(19) United States
(12) Patent Application Publication
(10) Pub. No.: US 2022/0205050 A1
(43) Pub. Date: Jun. 30, 2022

(54) METHOD AND MARKERS FOR IDENTIFYING AND QUANTIFYING OF NUCLEIC ACID SEQUENCE, MUTATION, COPY NUMBER, OR METHYLATION CHANGES

(71) Applicant: CORNELL UNIVERSITY, Ithaca, NY (US)

(72) Inventors: Francis BARANY, New York, NY (US); Manny D. BACOLOD, New York, NY (US); Jianmin HUANG, New York, NY (US); Philip FEINBERG, New York, NY (US); Aashiq MIRZA, New York, NY (US); Sarah GIARDINA, New York, NY (US)

(21) Appl. No.: 17/608,547

(22) PCT Filed: May 1, 2020
(86) PCT No.: PCT/US2020/031118

§ 371 Date: Nov. 3, 2021

Related U.S. Application Data
(60) Provisional application No. 62/843,083, filed on May 3, 2019.

(51) Int. Cl. C12Q 1/6886; C12Q 1/6848

(52) U.S. Cl. CPC C12Q 1/6886; C12Q 1/6848; C12Q 2600/156; C12Q 2600/154; C12Q 2600/118

(57) ABSTRACT

The present application relates to methods for identifying and/or quantifying low abundance, nucleotide base mutations, insertions, deletions, translocations, splice variants, miRNA variants, alternative transcripts, alternative start sites, alternative coding sequences, alternative non-coding sequences, alternative splicings, exon insertions, exon deletions, intron insertions, or other rearrangement at the genome level and/or methylated or hydroxymethylated nucleotide bases, as well as markers to identify early cancer, monitor cancer treatment, and identify early cancer recurrence.

[0001] This application claims the benefit of U.S. Provisional Patent Application Ser. No. 62/843,083, filed May 3, 2019, which is hereby incorporated by reference in its entirety.

### FIELD

[0002] The present application relates to methods and markers for identifying and quantifying nucleic acid sequence, mutation, copy number, and/or methylation changes using combinations of nuclease, ligation, DNA repair and polymerase reactions with carryover prevention.

### BACKGROUND

[0003] Cancer is the leading cause of death in developed countries and the second leading cause of death in developing countries. Cancer kills 580,000 patients annually in the US, 1.3 million in Europe, and 2.8 million in China (Siegel et al., “Cancer Statistics, 2016,” CA Cancer J. Clin. 66(1):7-30 (2016)). Cancer is now the biggest cause of mortality worldwide, with an estimated 8.2 million deaths from cancer in 2012 (Torre et al., “Global Cancer Statistics, 2012,” CA Cancer J. Clin. 65(2):87-108 (2015)). Cancer cases worldwide are forecast to rise by 75% and reach close to 25 million over the next two decades. The lifetime risk of a woman dying from an invasive cancer is 19%, for a man it is 23%. With total annual costs of cancer care in the U.S. exceeding $400 billion, there is no other medical issue that so urgently needs intelligent solutions.

[0004] In the U.S., new cancer cases among men are dominated by prostate (21%), lung (14%), colorectal (8%), urinary bladder (7%), melanoma (6%), non-Hodgkin lymphoma (5%), renal (5%), head and neck (4%), leukemia (4%), and liver and bile cancer (3%). Among women, most of the newly diagnosed cancers are breast (29%), lung (13%), colorectal (8%), uterine corpus (7%), thyroid (6%), non-Hodgkin lymphoma (4%), melanoma (3%), leukemia (3%), pancreatic (3%), and renal cancer (3%). The leading causes of cancer deaths are lung cancer (27%), prostate cancer (8%), colorectal cancer (8%), and lung cancer (26%), breast cancer (14%), colorectal cancer (8%), for men and women, respectively. These cancers are driven by different biological processes, and while there have been exciting advancements in the treatment of some cancers, such as the emergence of targeted therapeutics and immunotherapy, most cancers are found at later stage, where survival is poor. Due to lack of reliable and inexpensive early detection tests, many cancer types are diagnosed at later stages, where survival rates for some cancers drop to below 10%. The current screening technologies are failing due to low patient compliance, high expense, and low sensitivity and specificity rates (Das et al., “Predictive and Prognostic Biomarkers in Colorectal Cancer: A Systematic Review of Recent Advances and Challenges,” Biomedicine & Pharmacotherapy 87:8-19 (2016)). For example, the high cost, discomfort, and invasiveness of colonoscopy are significant impediments to patient compliance for CRC screening (Beydoun et al., “Predictors of Colorectal Cancer Screening Behaviors Among Average-risk Older Adults in the United States,” Cancer Causes & Control: CCC 19(4):339-359 (2008)). Likewise, patient distaste for handling feces has limited the success of FOBT/FIT, and eliminated stool-based tests as a remedy for low compliance. In contrast, the current proposal addresses these problems by developing a blood test with the potential to become widely adopted. Increasing patient compliance for CRC testing will lead to earlier detection and, ultimately, increased patient survival.

[0005] Ultimately, there is an urgent need to develop non-invasive, highly sensitive, highly specific, and cost-effective tests which will detect early-stage cancers. Two relatively recent developments in cancer research serve as the guiding principles for these tasks. First, is the use of modern genomic tools (such as genome-wide sequencing, transcriptional, and methylation profiling). Public accessibility to vast databases generated from these studies has accelerated the discovery of a wider list of molecular markers (such as promoter methylation, mutation, copy number, or expression levels of mRNA, microRNA, non-coding RNA (ncRNA), and long non-coding RNA (lncRNA) associated with cancer progression. Second is the discovery that nucleic acids can be released by the cancer cells into the patient's bloodstream. Cancer cells may undergo apoptosis (triggered cell death), which releases cell free DNA (cfDNA) into the patients' blood (Salvi et al., “Cell-free DNA as a Diagnostic Marker for Cancer: Current Insights,” OncoTargets and Therapy 9:6549-6559 (2016)). The levels of cfDNA in serum from patients with cancer vary from vanishingly small to high, but do not correlate with cancer stage (Perlin et al., “Serum DNA Levels in Patients With Malignant Disease,” American Journal of Clinical Pathology 58(5):601-602 (1972); Leon et al., “Free DNA in the Serum of Cancer Patients and the Effect of Therapy,” Cancer Res. 37(3):646-650 (1977)). Moreover, exosomes (lipid vesicles ranging from 30 to 100 nm), which are released into the blood by cancer cells, can contain the same RNA molecules which serve as transcriptional signatures of the tumors. Exosomes, or tumor associated vesicles, shield mRNA, lncRNA, ncRNA, and even mutant tumor DNA from exogenous nucleases, and, as such, the markers are in a protected state. Other protected states include, but are not limited to, DNA, RNA, and proteins within circulating tumor cells (CTCs), within other non-cellular membrane containing vesicles or particles, within nucleosomes, or within Argonaute or other protein complexes. cfDNA in particular, contains the same molecular aberrations as the solid tumors, such as mutations hyper/hypo methylation, copy number changes, or chromosomal rearrangements (Ignatiadis et al., “Circulating Tumor Cells and Circulating Tumor DNA for Precision Medicine: Dream or Reality?” Ann. Oncol. 25(12):2304-2313 (2014)).

[0006] Tumor-specific CpG methylations have been detected in the plasma from patients with a variety of solid tumors (Pratt V M, “Are We Ready for a Blood-Based Test to Detect Colon Cancer?” Clinical Chemistry 60(9):1141-1142 (2014); Warton et al., “Methylation of Cell-free Circulating DNA in the Diagnosis of Cancer,” Frontiers in Molecular Biosciences 2:13 (2015)), through various techniques involving bisulfite conversion of unmethylated cytosines, methylation-sensitive enzymes, or immunoprecipitation of 5-methylcytosines (Jorda et al., “Methods for DNA methylation analysis and applications in colon cancer,” Mutat. Res. 693(1-2):84-93 (2010)). Methylation signatures have better specificity towards a particular cancer type likely because methylation patterns are highly tissue specific (Issa J P, “DNA Methylation as a Therapeutic Target in Cancer,” Clin. Cancer Res. 13(6):1634-1637 (2007)). The best studied blood-based methylation markers for CRC detection are located in the promoter region of the SEPT9 gene (Church et al., “Prospective Evaluation of Methylated SEPT9 in Plasma for Detection of Asymptomatic Colorectal Cancer,” Gut 63(2):317-325 (2014); Lofton-Day et al., “DNA Methylation Biomarkers for Blood-Based Colorectal Cancer Screening,” Clinical Chemistry 54(2):414-423 (2008); Potter et al., “Validation of a Real-time PCR-based Qualitative Assay for the Detection of Methylated SEPT9 DNA in Human Plasma,” Clinical Chemistry 60(9):1183-1191 (2014); Ravegnini et al., “Simultaneous Analysis of SEPT9 Promoter Methylation Status, Micronuclei Frequency, and Folate-Related Gene Polymorphisms: The Potential for a Novel Blood-Based Colorectal Cancer Biomarker,” International Journal of Molecular Sciences 16(12):28486-28497 (2015); Toth et al., “Detection of Methylated SEPT9 in Plasma is a Reliable Screening Method for Both Left- and Right-sided Colon Cancers,” PloS One 7(9):e46000 (2002); Toth et al., “Detection of Methylated Septin 9 in Tissue and Plasma of Colorectal Patients with Neoplasia and the Relationship to the Amount of Circulating Cell-Free DNA,” PloS One 9(12):e115415 (2014); Warren et al., “Septin 9 Methylated DNA is a Sensitive and Specific Blood Test for Colorectal Cancer,” BMC Medicine 9:133 (2011)), and other potential markers for CRC diagnostics include CpG sites on promoter regions of THBD (Lange et al., “Genome-scale Discovery of DNA-methylation Biomarkers for Blood-Based Detection of Colorectal Cancer,” PloS One 7(11):e50266 (2012)), C9orf50 (Lange et al., “Genome-scale Discovery of DNA-methylation Biomarkers for Blood-Based Detection of Colorectal Cancer,” PloS One 7(11):e50266 (2012)), ZNF154 (Margolin et al., “Robust Detection of DNA Hypermethylation of ZNF154 as a Pan-Cancer Locus with in Silico Modeling for Blood-Based Diagnostic Development,” The Journal of Molecular Diagnostics 18(2):283-298 (2016)), and AGBL4, Fil1 and TWIST1 (Lin et al., “Clinical Relevance of Plasma DNA Methylation in Colorectal Cancer Patients Identified by Using a Genome-Wide High-Resolution Array,” Ann. Surg. Oncol. 22 Suppl 3:S1419-1427 (2015)). In breast cancer, methylation at promoter regions of tumor suppressor genes (including ATM, BRCA1, RASSF1, APC, and RARI3) has been detected in patients' cfDNAs (Tang et al., “Blood-based DNA Methylation as Biomarker for Breast Cancer: a Systematic Review,” Clinical Epigenetics 8:115 (2016)). A caveat for using methylation markers is that bisulfite conversion tends to destroy DNA, and thus decreases the overall signal that can be detected. Methylation detection techniques may also lead to false-positive signals due to incomplete conversion of unmethylated cytosines. As described herein, an extensive bioinformatics analysis of public databases has been performed to identify CRC-specific, and tissues-specific methylation markers suitable for detection of cancer in the plasma. The methylation marker detection assays enable a higher level of multiplexing with single-molecule detection capabilities, which are predicted to allow for higher sensitivity and specificity across a broad spectrum of cancers.

[0007] The challenge to develop reliable diagnostic and screening tests is to distinguish those markers emanating from the tumor that are indicative of disease (e.g., early cancer) vs. presence of the same markers emanating from normal tissue (which would lead to a false-positive signal). There is also a need to balance the number of markers examined and the cost of the test, with the specificity and sensitivity of the assay. Comprehensive molecular profiling (mRNA, methylation, copy number, miRNA, mutations) of thousands of tumors by The Cancer Genome Atlas Consortium (TCGA), has revealed that colorectal tumors are as different from each other as they are from breast, prostrate, or other epithelial cancers (TCGA “Comprehensive Molecular Characterization of Human Colon and Rectal Cancer Nature 487:330-337 (2014)). Further, those few markers they share in common are also present in multiple cancer types, hindering the ability to pinpoint the tissue of origin. BRAF mutations frequently occur in melanoma (42%) and thyroid cancer (41%), while KRAS is also highly mutated in pancreatic (55%) and lung (16%) cancers (Forbes et al., “COSMIC: Exploring the World's Knowledge of Somatic Mutations in Human Cancer,” Nucleic Acids Res. 43(Database issue):D805-811 (2015)). In general, CRC mutation markers such as those of KRAS and BRAF are found in late-stage primary cancers and metastases (Spindler et al., “Circulating free DNA as Biomarker and Source for Mutation Detection in Metastatic Colorectal Cancer,” PloS One 10(4):e0108247 (2015); Gonzalez-Cao et al., “BRAF Mutation Analysis in Circulating Free Tumor DNA of Melanoma Patients Treated with BRAF Inhibitors,” Melanoma Res. 25(6):486-495 (2015); Sakai et al., “Extended RAS and BRAF Mutation Analysis Using Next-Generation Sequencing,” PloS One 10(5):e0121891 (2015)). For early cancer detection, the nucleic acid assay should serve primarily as a screening tool, requiring the availability of secondary diagnostic follow-up (e.g., colonoscopy for colorectal cancer).

[0008] Compounding the biological problem is the need to reliably quantify mutation, CpG methylation, or DNA or RNA copy number from either a very small number of initial cells (i.e. from CTCs), or when the cancer signal is from cell-free DNA (cfDNA) in the blood and diluted by an excess of nucleic acid arising from normal cells, or inadvertently released from normal blood cells during sample processing (Mateo et al., “The Promise of Circulating Tumor Cell Analysis in Cancer Management,” Genome Biol. 15:448 (2014); Haque et al., “Challenges in Using ctDNA to Achieve Early Detection of Cancer,” BioRxiv. 237578 (2017)).

[0009] Some cancer IVD companies have developed commercially available methylation detection tests. The aforementioned SEPT9 methylation is the basis for Epi proColon test, a CRC-detection assay by Epigenomics (Lofton-Day et al., “DNA Methylation Biomarkers for Blood-based Colorectal Cancer Screening,” Clinical Chemistry 54(2):414-423 (2008)). While initial results on smaller sample sets showed promise, large-scale studies with 1,544 plasma samples showed a sensitivity of 64% for stage I-III CRC, and a specificity of 78%-82%, effectively sending 180 to 220 out of 1,000 individuals to unnecessary colonoscopies (Potter et al., “Validation of a Reg-time PCR-based Qualitative Assay for the Detection of Methylated SEPT9 DNA in Human Plasma,” Clinical Chemistry 60(9):1183-1191 (2014)). Clinical Genomics is currently developing blood based CRC detection test based on the methylation of the BCAT1 and IKZF1 genes (Pedersen et al., “Evaluation of an Assay for Methylated BCAT1 and IKZF1 in Pasma for Detection of Colorectal Neoplasia,” BMC Cancer 15:654 (2015)]. Large-scale studies using 2,105 plasma samples of this two-marker test showed an overall sensitivity of 66%, with 38% for stage I CRC, and an impressive specificity of 94% (Young et al, “A Cross-sectional Study Comparing a Blood Test for Methylated BCAT1 and IKZF1 Tumor-derived DNA with CEA for Detection of Recurrent Colorectal Cancer,” Cancer Medicine 5(10): 2763-2772 (2016)). Exact Sciences and collaborators have slightly improved the sensitivity of CRC fecal tests (Bosch et al., “Analytical Sensitivity and Stability of DNA Methylation Testing in Stool Samples for Colorectal Cancer Detection,” Cell Oncol. (Dordr) 35(4):309-315 (2012); Hong et al., “DNA Methylation Biomarkers of Stool and Blood for Early Detection of Colon Cancer,” Genet. Test. Mol. Biomarkers 17(5):401-406 (2013); Imperiale et al., “Multitarget Stool DNA Testing for Colorectal-Cancer Screening,” N. Engl. J. Med. 370(14):1287-1297 (2014); Xiao et al., “Validation of Methylation-Sensitive High-Resolution Melting (MS-HRM) for the Detection of Stool DNA Methylation in Colorectal Neoplasms,” Clin. Chim. Acta 431:154-163 (2014); Yang et al., “Diagnostic Value of Stool DNA Testing for Multiple Markers of Colorectal Cancer and Advanced Adenoma: a Meta-Analysis,” Can. J. Gastroenterol. 27(8):467-475 (2013)), by adding K-ras mutation as well as BMP3 and NDRG4 methylation markers (Lidgard et al., “Clinical Performance of an Automated Stool DNA Assay for Detection of Colorectal Neoplasia,” Clin. Gastroenterol. Hepatol. 11(10):1313-1318 (2013)). Large-scale studies on 12,500 stool samples claims 93% sensitivity, yet specificity is still only 85%, essentially sending 150 out of 1,000 individuals to unnecessary colonoscopies. Despite logistical issues in handling feces, Exact Sciences recently sold their millionth test. The Cologuard website states the test result has both false-positives and false-negatives, and the test should not be used if the patient has hemorrhoids, menstrual period, or blood in the stool. The Cologuard website also warns that the test is not for use by patients with Ulcerative Colitis (UC), Crohn's disease (CD), Inflammatory Bowel Disease (IBD), or with a family history of cancer. In other words, Exact Sciences excludes the very patients who would most benefit from an accurate CRC detection test. More recently, Laboratory for Advanced Medicine (based in Irvine, Calif. with ties to various Chinese academic institutions) demonstrated the potential of interrogating the methylation status of a single CpG site (cg10673833) for blood-based detection of colorectal cancer (Luo et al., “Circulating Tumor DNA Methylation Profiles Enable Early Diagnosis, Prognosis Prediction, and Screening for Colorectal Cancer,” Science Translational Medicine 12:(524) (2020)).

### A Continuum of Diagnostic Needs Will Require a Continuum of Diagnostic Tests.

[0010] The majority of current molecular diagnostics efforts in cancer have centered on: (i) prognostic and predictive genomics, e.g., identifying inherited mutations in cancer predisposition genes, such as BrCA1, BrCA2, (Ford et al., Am. J. Hum. Genet. 62:676-689 (1998)) (ii) individualized treatment, e.g., mutations in the EGFR gene guiding personalized medicine (Sequist and Lynch, Ann. Rev. Med, 59:429-442 (2008)), and (iii) recurrence monitoring, e.g., detecting emerging KRAS mutations in patients developing resistance to drug treatments (Hiley et al., Genome Biol. 15: 453 (2014); Amado et al., J. Clin. Oncol. 26:1626-1634 (2008)). Yet, this misses major opportunities in the cancer molecular diagnostics continuum: (i) more frequent screening of those with a family history, (ii) screening for detection of early disease, and (iii) monitoring treatment efficacy. To address these three unmet needs, a new metric for blood-based detection termed “cancer marker load”, analogous to viral load is herein proposed.

[0011] DNA sequencing provides the ultimate ability to distinguish all nucleic acid changes associated with disease. However, the process still requires multiple up-front sample and template preparation, and consequently, DNA sequencing is not always cost-effective. DNA microarrays can provide substantial information about multiple sequence variants, such as SNPs or different RNA expression levels, and are less costly then sequencing; however, they are less suited for obtaining highly quantitative results, nor for detecting low abundance mutations. On the other end of the spectrum is the TaqMan™ reaction, which provides real-time quantification of a known gene, but is less suitable for distinguishing multiple sequence variants or low abundance mutations.

[0012] NGS requires substantial up-front sample preparation to polish ends and append linkers, and the current error rates of 0.7% are too high to identify 2-3 molecules of mutant sequence in a 10,000-fold excess of wild-type molecules. “Deep sequencing” protocols have been developed to overcome this deficiency by appending unique molecular identifiers to both strands of an individual fragment. These approaches are known as: Tam-Seq & CAPP-Seq (Roche), Circle-Seq (Guardant Health), Safe-SeqS (Personal Genome Diagnostics), ThruPlex (Rubicon Genomics), NEBNext (New England Biolabs), QlAseq (Qiagen), Oncomine (ThermoFisher), Duplex Barcoding (Schmitt), SMRT (Pacific Biosciences), SiMSen-Seq (Stahlberg), and smMIP (Shendure). However, these methods require a 30 to 100-fold depth per mutant strand to verify each mutation and distinguish from other types of sequencing errors. Recent work from MSKCC demonstrates that 60,000-fold coverage is required to accurately identify mutations in plasma from metastatic cancer patients (91% sensitivity, 508-gene panel, 60,000×). Compounding the challenge, a recent paper from NEB has called into question the quality of the most widely used databases for rare variant and somatic mutations (Chen et al., “DNA Damage is a Pervasive Cause of Sequencing Errors, Directly Confounding Variant Identification,” Science 355(6326):752-756 (2017)).

[0013] It is critical to match each unmet diagnostic need with the appropriate diagnostic test—one that combines the divergent goals of achieving both high sensitivity (i.e., low false-negatives) and high specificity (i.e., low false-positives) at a low cost. For example, direct sequencing of EGFR exons from a tumor biopsy to determine treatment for non-small cell lung cancer (NSCLC) is significantly more accurate and cost effective than designing TaqMan™ probes for the over 180 known mutations whose drug response is already catalogued (Jia et al., Genome Res. 23:1434-1445 (2013)). The most sensitive technique for detecting point mutations, such as “BEAMing” (Dressman et al., Proc. Natl. Acad. Sci. USA 100: 8817-8822 (2003)), rely on prior knowledge of which mutations to look for, and thus are best suited for monitoring for disease recurrence, rather than for early detection. Likewise, to monitor blood levels of Bcr-Abl translocations when treating CML patients with Gleevec (Jabbour et al., Cancer 112: 2112-2118 (2008)), a simple quantitative reverse-transcription PCR assay is far preferable to sequencing the entire genomic DNA in 1 ml of blood (9 million cells×3 GB=27 million Gb of raw data).

[0014] Sequencing 2.1 Gb each of cell-free DNA (cfDNA) isolated from NSCLC patients was used to provide 10,000-fold coverage on 125 kb of targeted DNA (Kandoth et al., Nature 502: 333-339 (2013)). This approach correctly identified mutations present in matched tumors, although only 50% of stage 1 tumors were covered. The approach has promise for NSCLC, where samples average 5 to 20 mutations/Mb, however targeted NGS would not be cost effective for other cancers such as breast and ovarian, that average less than 1 to 2 mutations per Mb. Current up-front ligation, amplification, and/or capture steps required for highly accurate targeted deep sequencing are still more complex than multiplexed PCR-TaqMan™ or PCR-LDR assays.

[0015] Deep sequencing of cfDNAs for 58 cancer-related genes at 30,000-fold coverage is capable of detecting Stage 1 or 2 cancer at moderately high sensitivity but missed 29% of CRC, 41% of breast, 41% of lung, and 32% of ovarian cancer, respectively (Phallen et al., “Direct Detection of Early-stage Cancers Using Circulating Tumor DNA,” Science Translational Medicine 9(403) (2017)). An alternative strategy relied on targeted sequencing of an average of 30 bases in 61 segments to interrogate “hot-spot” mutations in 16 genes including TP53, KRAS, APC, PIK3CA, PTEN, missed more early cancers (Cohen et al., “Detection and Localization of Surgically Resectable Cancers with a Multi-analyte Blood Test,” Science (2018). To extend the sensitivity of mutation sequencing, the Hopkins team very recently combined NGS with quantitation of serum protein markers (such as CA-125, CA19-9, CEA, HGF, Myeloperoxidase, OPN, Prolactin, TIMP-1) and improved detection of five cancer types (ovary, liver, stomach, pancreas, and esophagus) at sensitivities ranging from 69% to 98% (Cohen et al. “Detection and Localization of Surgically Resectable Cancers with a Multi-analyte Blood Test,” Science (2018). One caveat of using these protein markers is that prior large-scale studies with age-matched controls (n=22,000) have not shown clinical utility (Jacobs et al., “Prevalence Screening for Ovarian Cancer in Postmenopausal Women by CA 125 Measurement and Ultrasonography,” BMJ 306(6884):1030-1034 (1993)). Thus, in a 2018 JAMA report, “The USPSTF recommends against [CA-125] screening for ovarian cancer in asymptomatic women. This recommendation applies to asymptomatic women who are not known to have a high risk hereditary cancer syndrome” (USPSTF et al., “Screening for Ovarian Cancer: US Preventive Services Task Force Recommendation Statement” JAMA 319(6):588-594 (2018)). Another caveat of using these protein markers is that they reflect tissue damage and are likely to also appear in patients with inflammatory diseases such as arthritis (Kaiser, “Liquid Biopsy for Cancer Promises Early Detection,” Science 359(6373):259 (2018)). With the growing obesity epidemic and an aging population in the U.S., the risk of false-positives from protein markers increases with obesity and age-driven inflammation.

[0016] More recently, the NGS sequencing companies (Grail, Guardant Health, Natera, Freenome) have moved aggressively to expand their targeted sequencing panels to also now include whole genome sequencing (WGS) and whole genome bisulfite sequencing (Bis-WGS). The recent results from Grail, abstract published at ASCO 2018 (Klein et al., “Development of a Comprehensive Cell-free DNA (cfDNA) Assay for Early Detection of Multiple Tumor Types: The Circulating Cell-free Genome Atlas (CCGA) Study,” ASCO Annual Meeting 2018, Chicago, Ill.; Abstract 12021 #134)) reveal that while sensitivity claims of detecting “early” CRC are at 63%, that is based on only 27 samples, most of which are Stage III. Even mutation rich lung cancer gives sensitivity at 50%, again with most samples at Stage III. When most of the samples are Stage I & II, such as prostate cancer, the sensitivity for “early cancer” detection drops to <5%. When attempting to detect the most common form of breast cancer (HR+/HER2), the sensitivity drops to <13%. Worse, those breast cancers diagnosed by screening gave sensitivities of <11%. In short, the NGS approach fails by consistently missing 30% to 80% of early-stage cancers (i.e. stage I & II). In a research initially reported in 2019 ASCO meeting (Liu et al., “Simultaneous Multi-cancer Detection and Tissue of Origin (TOO) Localization Using Targeted Bisulfite Sequencing Plasma Cell-free DNA (cfDNA),” ASCO Breakthrough Presentation 2019)), and subsequently published in 2020 (Liu et al., “Sensitive and Specific Multi-cancer Detection and Localization Using Methylation Signatures in Cell-free DNA,” Annals of Oncology; In Press (2020)), GRAIL indicated that their Multi-Cancer Early Detection Test exhibited an Overall Detection Rate (12 deadly cancer types) of 76% (99.3% specificity). A combined analysis of this group of cancers showed robust detection across all stages with detection rates of 39 percent (27-52%), 69 percent (56-80%), 83 percent (75-90%), and 92 percent (86-96%) at stages I (n=62), II (n=62), III (n=102), and IV (n=130), respectively. In another conference, GRAIL and collaborators (Oxnard et al., “Simultaneous Multi-cancer Detection and Tissue of Origin (TOO) Localization Using Targeted Bisulfite Sequencing of Plasma Cell-free DNA (cfDNA),” ESMO Congress (2019)), reported the results from their analysis of cell-free DNA (DNA that had once been confined to cells but had entered the bloodstream upon the cells' death) in 3,583 blood samples, including 1,530 from patients diagnosed with cancer and 2,053 from people without cancer. The patient samples comprised more than 20 types of cancer, including hormone receptor-negative breast, colorectal, esophageal, gallbladder, gastric, head and neck, lung, lymphoid leukemia, multiple myeloma, ovarian, and pancreatic cancer. The overall specificity was 99.4%, meaning only 0.6% of the results incorrectly indicated that cancer was present. The sensitivity of the assay for detecting a pre-specified high mortality cancer (the percent of blood samples from these patients that tested positive for cancer) was 76%. Within this group, the sensitivity was 32% for patients with stage I cancer; 76% for those with stage II; 85% for stage III; and 93% for stage IV. Sensitivity across all cancer types was 55%, with similar increases in detection by stage. For the 97% of samples that returned a tissue of origin result, the test correctly identified the organ or tissue of origin in 89% of cases. However, another 2019 study (reported by GRAIL and collaborators) questioned the validity of the aforementioned reports (Razavi et al., “High-intensity Sequencing Reveals the Sources of Plasma Circulating Cell-free DNA Variants,” Nat Med 25(12):1928-1937 (2019)). Through a 2 Mb, 508-gene panel sequencing (60,000×depth), the authors demonstrated the vast majority of cell-free DNA mutations in both non-cancer controls and cancer patients had features consistent with clonal hematopoiesis, a process whereby white blood cells progressively accumulate somatic alterations without necessarily producing a hematological condition or malignancy. Indeed. mutations appeared in 93.6 percent of the white blood cells from individuals without cancer and 99.1 percent of those with cancer. In a recently held conference, GRAIL and their collaborators reported that their blood-based test can detect multiple GI cancers at sensitivity of under 50% for Stage I, and 73% for Stage 1-III (Wolpin et al., “Performance of a Blood-based Test for the Detection of Multiple Cancer Types,” In: Gastrointestinal Cancers Symposium 2020 (2020)). As for Freenome, a recent ASCO presentation indicated that their platform (plasma analysis by whole-genome sequencing, bisulfite sequencing, and protein quantification methods) was able to achieve a mean sensitivity of 92% in early-stage (n=17) and 84% in late-stage (n=11) at a specificity of 90% for colorectal adenocarcinoma detection. Across all CRC pathological subtypes, the Freenome test achieved a specificity of 90%, and sensitivities of 80% and 83% for early-stage (n=19) and late-stage (n=12), respectively. Private discussion with Imran Haque, who just resigned as CSO of Freenome—where he had a $70 million budget and 30 scientists to sequence the plasma of 817 CRC and matched control patients—confirmed that Freenome (as well as GRAIL) were overcalling the data, and that none of them had a cogent approach to achieve cost-effective true early cancer detection (Wan et al., “Machine Learning Enables Detection of Early-stage Colorectal Cancer by Whole-genome Sequencing of Plasma Cell-free DNA,” BioRxiv 478065 (2018)).

[0017] A comprehensive data analysis of over 600 colorectal cancer samples that takes into account tumor heterogeneity, tumor clusters, and biological/technical false-positives ranging from 3% to 10% per individual marker showed that the optimal early detection screen for colorectal cancer would require at least 5 to 6 positive markers out of 24 markers tested (Bacolod et al, Cancer Res. 69:723-727 (2009); Tsafrir et al., Cancer Res. 66: 2129-2137 (2006); Weinstein et al., Nat. Genet. 45: 1113-1120 (2013); Navin N. E. Genome Biol. 15: 452 (2014); Hiley et al., Genome Biol 15:453 (2014)); Esserman et al. Lancet Oncol 15:e234-242 (2014)). Further, marker distribution is biased into different tumor clades, e.g., some tumors are heavily methylated, while others are barely methylated, and indistinguishable from age-related methylation of adjacent tissue. Consequently, a multidimensional approach using combinations of 3-5 sets of mutation, methylation, miRNA, ncRNA, lncRNA, mRNA, copy-variation, alternative splicing, or translocation markers is needed to obtain sufficient coverage of all different tumor clades. Analogous to non-invasive prenatal screening for trisomy, based on sequencing or performing ligation detection on random fragments of cfDNA (Benn et al., Ultrasound Obstet. Gynecol. 42(1):15-33 (2013); Chiu et al., Proc. Natl. Acad. Sci. USA 105: 20458-20463 (2008); Juneau et al., Fetal Diagn. Ther. 36(4) (2014)), the actual markers scored in a cancer screen are secondary to accurate quantification of those positive markers in the plasma.

[0018] As pointed out above, cancer-specific RNA markers (including microRNAs, lncRNAs, and mRNAs) may also be present in blood, either free of any compartment (Souza et al., “Circulating mRNAs and miRNAs as Candidate Markers for the Diagnosis and Prognosis of Prostate Cancer,” PloS One 12(9):e0184094 (2017)), or contained in exosomes (Nedaeinia et al., “Circulating Exosomes and Exosomal microRNAs as Biomarkers in Gastrointestinal Cancer,” Cancer Gene Ther 24(2):48-56 (2017); Lai et al., “A microRNA Signature in Circulating Exosomes is Superior to Exosomal Glypican-1 Levels for Diagnosing Pancreatic Cancer,” Cancer Lett 39:86-93 (2017)) or circulating tumor cells (“CTCs”), and have been tagged as potential indicators of early-stage cancers. Challenges abound regarding the use of plasma-derived nucleic markers in early cancer detection, including the minuscule amount of these markers in blood relative to those derived from surrounding cells. Indeed, these limitations make it appear that these “early” detection assays are more likely to detect late-stage primary and metastatic cancers (Pantel “Blood-Based Analysis of Circulating Cell-Free DNA and Tumor Cells for Early Cancer Detection,” PLoS Med 13(12):e1002205 (2016)).

### Technical Challenges of Cancer Diagnostic Test Development.

[0019] Diagnostic tests that aim to find very rare or low-abundance mutant sequences face potential false-positive signal arising from: (i) polymerase error in replicating wild-type target, (ii) DNA sequencing error, (iii) mis-ligation on wild-type target, (iii) target independent PCR product, and (iv) carryover contamination of PCR products arising from a previous positive sample. The profound clinical implications of a positive test result when screening for cancer demand that such a test use all means possible to virtually eliminate false-positives.

[0020] Central to the concept of nucleic acid detection is the selective amplification or purification of the desired cancer-specific markers away from the same or closely similar markers from normal cells. These approaches include: (i) multiple primer binding regions for orthogonal amplification and detection, (ii) affinity selection of CTC's or exosomes, and (iii) spatial dilution of the sample.

[0021] The success of PCR-LDR, which uses 4 primer-binding regions to assure sensitivity and specificity, has previously been demonstrated. Desired regions are amplified using pairs or even tandem pairs of PCR primers, followed by orthogonal nested LDR primer pairs for detection. One advantage of using PCR-LDR is the ability to perform proportional PCR amplification of multiple fragments to enrich for low copy targets, and then use quantitative LDR to directly identify cancer-specific mutations. Biofire/bioMerieux has developed a similar technology termed “film array”; wherein initial multiplexed PCR reaction products are redistributed into individual wells, and then nested real-time PCR performed with SYBR Green Dye detection.

[0022] Affinity purification of CTC's using antibody or aptamer capture has been demonstrated (Adams et al., J. Am. Chem. Soc. 130: 8633-8641 (2008); Dharmasiri et al., Electrophoresis 30:3289-3300 (2009); Soper et al. Biosens. Bioelectron. 21:1932-1942 (2006)). Peptide affinity capture of exosomes has been reported in the literature. Enrichment of these tumor-specific fractions from the blood enables copy number quantification, as well as simplifying screening and verification assays.

[0023] The last approach, spatial dilution of the sample, is employed in digital PCR as well as its close cousin known as BEAMing (Vogelstein and Kinzler, Proc. Natl. Acad. Sci. USA. 96(16):9236-41 (1999); Dressman et al., Proc. Natl. Acad. Sci. USA 100:8817-8822 (2003)). The rational for digital PCR is to overcome the limit of enzymatic discrimination when the sample comprises very few target molecules containing a known mutation in a 1,000 to 10,000-fold excess of wild-type DNA. By diluting input DNA into 20,000 or more droplets or beads to distribute less than one molecule of target per droplet, the DNA may be amplified via PCR, and then detected via probe hybridization or TaqMan™ reaction, giving in essence a 0/1 digital score. The approach is currently the most sensitive for finding point mutations in plasma, but it does require prior knowledge of the mutations being scored, as well as a separate digital dilution for each mutation, which would deplete the entire sample to score just a few mutations (Alcaide et al., “A Novel Multiplex Droplet Digital PCR Assay to Identify and Quantify KRAS Mutations in Clinical Specimens,” J. Mol. Diagn. 21:28-33 (2019); Guibert et al., “Liquid Biopsy of Fine-Needle Aspiration Supernatant for Lung Cancer Genotyping,” Lung Cancer 1768:193-207 (2018); Yoshida et al., “Highly Sensitive Detection of ALK Resistance Mutations in Plasma Using Droplet Digital PCR,” BMC Cancer 18:1136 (2018)).

[0024] When developing multiplexed assays, there is a tricky balance between performing enough preliminary cycles of PCR or other amplification techniques to generate sufficient copies of each mutant or methylated region such that when diluting into uniplex qPCR, multiplex qPCR, uniplex droplet PCR or multiplexed droplet PCR there are sufficient copies to get a signal if true positive; and performing too many PCR cycles such that some markers over-amplify while others are suppressed, or relative quantification is lost.

[0025] The present application is directed at overcoming these and other deficiencies in the art.

### SUMMARY

[0026] A first aspect of the present application is directed to a method for identifying, in a sample, one or more parent nucleic acid molecules containing a target nucleotide sequence differing from nucleotide sequences of other parent nucleic acid molecules in the sample by one or more nucleotides, one or more copy numbers, one or more transcript sequences, and/or one or more methylated or hydroxymethylated residues. The method involves providing a sample containing one or more parent nucleic acid molecules potentially containing the target nucleotide sequence differing from the nucleotide sequences of other parent nucleic acid molecules by one or more nucleotides, one or more copy numbers, one or more transcript sequences, and/or one or more methylated or hydroxymethylated residues. One or more enzymes capable of digesting deoxyuracil (dU)-containing nucleic acid molecules are then provided. One or more primary oligonucleotide primer sets are also provided. Each primary oligonucleotide primer set comprises (a) a first primary oligonucleotide primer that comprises a nucleotide sequence that is complementary to a sequence in the parent nucleic acid molecule adjacent to the target nucleotide sequence and (b) a second primary oligonucleotide primer that comprises a nucleotide sequence that is complementary to a portion of an extension product formed from the first primary oligonucleotide primer, wherein the first or second primary oligonucleotide primer further comprises of a 5′ primer-specific portion. The sample, the one or more first primary oligonucleotide primers of the primer sets, the one or more enzymes capable of digesting deoxyuracil (dU)-containing nucleic acid molecules, a deoxynucleotide mix, and a DNA polymerase are blended to form one or more polymerase extension reaction mixtures. The one or more polymerase extension reaction mixtures are then subjected to conditions suitable for digesting deoxyuracil (dU)-containing nucleic acid molecules present in the polymerase extension reaction mixtures and for carrying out one or more polymerase extension reaction cycles. The one or more polymerase extension reaction cycles comprise a denaturation treatment, a hybridization treatment, and an extension treatment, thereby forming primary extension products comprising nucleotide sequences complementary to the target nucleotide sequence. The one or more polymerase extension reaction mixtures comprising the primary extension products, the one or more second primary oligonucleotide primers of the primary oligonucleotide primer sets, the one or more enzymes capable of digesting deoxyuracil (dU)-containing nucleic acid molecules in the reaction mixtures, a deoxynucleotide mix including dUTP, and a DNA polymerase are blended to form one or more first polymerase chain reaction mixtures. The method further comprises subjecting the one or more first polymerase chain reaction mixtures to conditions suitable for digesting deoxyuracil (dU)-containing nucleic acid molecules present in the polymerase chain reaction mixtures and for carrying out one or more first polymerase chain reaction cycles comprising a denaturation treatment, a hybridization treatment, and an extension treatment, thereby forming first polymerase chain reaction products comprising the target nucleotide sequence or a complement thereof. One or more oligonucleotide probe sets are then provided. Each probe set comprises (a) a first oligonucleotide probe having a 5′ primer-specific portion and a 3′ target sequence-specific portion, and (b) a second oligonucleotide probe having a 5′ target sequence-specific portion and a 3′ primer-specific portion, wherein the first and second oligonucleotide probes of a probe set are configured to hybridize, in a base specific manner, on a complementary target nucleotide sequence of a first polymerase chain reaction product. The first polymerase chain reaction products are blended with a ligase, and the one or more oligonucleotide probe sets to form one or more ligation reaction mixtures. The one or more ligation reaction mixtures are subjected to one or more ligation reaction cycles whereby the first and second oligonucleotide probes of the one or more oligonucleotide probe sets are ligated together, when hybridized to their complementary sequence, to form ligated product sequences in the ligation reaction mixtures wherein each ligated product sequence comprises the 5′ primer-specific portion, the target-specific portions, and the 3′ primer-specific portion. The method further includes providing one or more secondary oligonucleotide primer sets. Each secondary oligonucleotide primer set comprises (a) a first secondary oligonucleotide primer comprising the same nucleotide sequence as the 5′ primer-specific portion of the ligated product sequence and (b) a second secondary oligonucleotide primer comprising a nucleotide sequence that is complementary to the 3′ primer-specific portion of the ligated product sequence. The ligated product sequences, the one or more secondary oligonucleotide primer sets, the one or more enzymes capable of digesting deoxyuracil (dU)-containing nucleic acid molecules, a deoxynucleotide mix including dUTP, and a DNA polymerase are blended to form one or more second polymerase chain reaction mixtures. The one or more second polymerase chain reaction mixtures are subjected to conditions suitable for digesting deoxyuracil (dU)-containing nucleic acid molecules present in the second polymerase chain reaction mixtures and for carrying out one or more polymerase chain reaction cycles comprising a denaturation treatment, a hybridization treatment, and an extension treatment thereby forming second polymerase chain reaction products. The method further comprises detecting and distinguishing the second polymerase chain reaction products in the one or more second polymerase chain reaction mixtures to identify the presence of one or more parent nucleic acid molecules containing target nucleotide sequences differing from nucleotide sequences in other parent nucleic acid molecules in the sample by one or more nucleotides, one or more copy numbers, one or more transcript sequences, and/or one or more methylated or hydroxymethylated residues.

[0027] Another aspect of the present application is directed to a method for identifying, in a sample, one or more parent nucleic acid molecules containing a target nucleotide sequence differing from nucleotide sequences of other parent nucleic acid molecules in the sample by one or more nucleotides, one or more copy numbers, one or more transcript sequences, and/or one or more methylated or hydroxymethylated residues. The method involves providing a sample containing one or more parent nucleic acid molecules potentially containing the target nucleotide sequence differing from the nucleotide sequences of other parent nucleic acid molecules by one or more nucleotides, one or more copy numbers, one or more transcript sequences, and/or one or more methylated or hydroxymethylated residues. One or more enzymes capable of digesting deoxyuracil (dU)-containing nucleic acid molecules and one or more nucleases capable of digesting nucleic acid molecules present not comprising polymerase-incorporated modified nucleotides are provided. The method also involves providing one or more primary oligonucleotide primer sets. Each primary oligonucleotide primer set comprises (a) a first primary oligonucleotide primer that comprises a nucleotide sequence that is complementary to a sequence in the parent nucleic acid molecule adjacent to the target nucleotide sequence and (b) a second primary oligonucleotide primer that comprises a nucleotide sequence that is complementary to a portion of an extension product formed from the first primary oligonucleotide primer, wherein the first or second primary oligonucleotide primer further comprises a 5′ primer-specific portion. The sample, the one or more first primary oligonucleotide primers, the one or more enzymes capable of digesting deoxyuracil (dU)-containing nucleic acid molecules, a deoxynucleotide mix that comprises one or more modified nucleotides that protect extension products but not other DNA from nuclease digestion, and a DNA polymerase are blended to form one or more polymerase extension reaction mixtures. The one or more polymerase extension reaction mixtures are then subjected to conditions suitable for digesting deoxyuracil (dU)-containing nucleic acid molecules present in the polymerase extension reaction mixtures and for carrying out one or more polymerase extension reaction cycles comprising a denaturation treatment, a hybridization treatment, and an extension treatment, thereby forming primary extension products comprising modified nucleotide bases and comprising the complement of the target nucleotide sequence. The method comprises blending the one or more polymerase extension reaction mixtures comprising the primary extension products with the one or more nucleases. The one or more polymerase extension reaction mixtures comprising the primary extension products with the one or more nucleases are subjected to conditions suitable for digesting nucleic acid molecules but not primary extension products comprising modified nucleotides to produce one or more partially digested polymerase extension reaction mixtures. The method further comprises blending the one or more partially digested polymerase extension reaction mixtures, the one or more secondary primary oligonucleotide primers of the primer sets, a deoxynucleotide mix, and a DNA polymerase to form one or more first polymerase chain reaction mixtures. The one or more first polymerase chain reaction mixtures are subjected to conditions suitable for carrying out two or more first polymerase chain reaction cycles comprising a denaturation treatment, a hybridization treatment, and an extension treatment, thereby forming first polymerase chain reaction products comprising the target nucleotide sequence or a complement thereof. One or more secondary oligonucleotide primer sets are then provided. Each secondary oligonucleotide primer set comprises (a) a first secondary oligonucleotide primer having a 3′ portion that is complementary to a portion of an extension product formed from the first primary oligonucleotide primer and (b) a second secondary oligonucleotide primer having a 3′ portion that comprises a nucleotide sequence that is complementary to a portion of an extension product formed from the first secondary oligonucleotide primer. The first polymerase chain reaction products, the one or more secondary oligonucleotide primer sets, the one or more enzymes capable of digesting deoxyuracil (dU) containing nucleic acid molecules, a deoxynucleotide mix including dUTP, and a DNA polymerase are blended to form one or more second polymerase chain reaction mixtures. The one or more second polymerase chain reaction mixtures are subjected to conditions suitable for digesting deoxyuracil (dU)-containing nucleic acid molecules present in the second polymerase chain reaction mixtures and for carrying out two or more second polymerase chain reaction cycles comprising a denaturation treatment, a hybridization treatment, and an extension treatment thereby forming second polymerase chain reaction products. The method further comprises detecting and distinguishing the second polymerase chain reaction products in the one or more second polymerase chain reaction mixtures to identify the presence of one or more parent nucleic acid molecules containing target nucleotide sequences differing from nucleotide sequences in other parent nucleic acid molecules in the sample by one or more nucleotides, one or more copy numbers, one or more transcript sequences, and/or one or more methylated or hydroxymethylated residues.

[0028] Another aspect of the present application is directed to a method for identifying, in a sample, one or more parent nucleic acid molecules containing a target nucleotide sequence differing from nucleotide sequences in other parent nucleic acid molecules in the sample by one or more methylated or hydroxymethylated residues. The method involves providing a sample containing one or more parent nucleic acid molecules potentially containing the target nucleotide sequence differing from the nucleotide sequences in other parent nucleic acid molecules by one or more methylated or hydroxymethylated residues and subjecting the nucleic acid molecules in the sample to a treatment with one or more DNA repair enzymes and chemicals under conditions suitable to convert methylated and hydroxymethylated cytosine residues to dihydrouracil residues to produce a treated sample. One or more enzymes capable of digesting deoxyuracil (dU)-containing nucleic acid molecules are then provided. The method further involves providing one or more primary oligonucleotide primer sets. Each primary oligonucleotide primer set comprises (a) a first primary oligonucleotide primer that comprises a nucleotide sequence that is complementary to a sequence in the parent nucleic acid molecule adjacent to the DNA repair enzyme and chemically-treated target nucleotide sequence containing the one or more converted methylated or hydroxymethylated residue and (b) a second primary oligonucleotide primer that comprises a nucleotide sequence that is complementary to a portion of an extension product formed from the first primary oligonucleotide primer, wherein the first or second primary oligonucleotide primer further comprises a 5′ primer-specific portion. The treated sample, the one or more first primary oligonucleotide primers of the primer sets, the one or more enzymes capable of digesting deoxyuracil (dU)-containing nucleic acid molecules, a deoxynucleotide mix including dUTP, and a DNA polymerase are blended to form one or more polymerase extension reaction mixtures. The one or more polymerase extension reaction mixtures are subjected to conditions suitable for digesting deoxyuracil (dU)-containing nucleic acid molecules present in the polymerase extension reaction mixtures and for carrying out one or more polymerase extension reaction cycles comprising a denaturation treatment, a hybridization treatment, and an extension treatment, thereby forming primary extension products comprising the complement of the DNA repair enzyme and chemically-treated target nucleotide sequence. The one or more polymerase extension reaction mixtures comprising the primary extension products, the one or more second primary oligonucleotide primers of the primer sets, a deoxynucleotide mix including dUTP, and a DNA polymerase are blended to form one or more first polymerase chain reaction mixtures. The one or more first polymerase chain reaction mixtures are subjected to conditions suitable for carrying out one or more first polymerase chain reaction cycles comprising a denaturation treatment, a hybridization treatment, and an extension treatment, thereby forming first polymerase chain reaction products comprising the DNA repair enzyme and chemically-treated target nucleotide sequence or a complement thereof. The method further involves providing one or more oligonucleotide probe sets. Each probe set comprises (a) a first oligonucleotide probe having a 5′ primer-specific portion and a 3′ DNA repair enzyme and chemically-treated target nucleotide sequence-specific or complement sequence-specific portion, and (b) a second oligonucleotide probe having a 5′ DNA repair enzyme and chemically-treated target nucleotide sequence-specific or complement sequence-specific portion and a 3′ primer-specific portion, and wherein the first and second oligonucleotide probes of a probe set are configured to hybridize, in a base specific manner, on a complementary nucleotide sequence of a first polymerase chain reaction product. The first polymerase chain reaction products are blended with a ligase and the one or more oligonucleotide probe sets to form one or more ligation reaction mixtures. The one or more ligation reaction mixtures are subjected to one or more ligation reaction cycles whereby the first and second oligonucleotide probes of the one or more oligonucleotide probe sets are ligated together, when hybridized to their complementary sequence, to form ligated product sequences in the ligation reaction mixture wherein each ligated product sequence comprises the 5′ primer-specific portion, DNA repair enzyme and chemically-treated target nucleotide sequence-specific or complement sequence-specific portion, and the 3′ primer-specific portion. The method further comprises providing one or more secondary oligonucleotide primer sets. Each secondary oligonucleotide primer set comprises (a) a first secondary oligonucleotide primer comprising the same nucleotide sequence as the 5′ primer-specific portion of the ligated product sequence and (b) a second secondary oligonucleotide primer comprising a nucleotide sequence that is complementary to the 3′ primer-specific portion of the ligated product sequence. The ligated product sequences, the one or more secondary oligonucleotide primer sets, the one or more enzymes capable of digesting deoxyuracil (dU)-containing nucleic acid molecules, a deoxynucleotide mix including dUTP, and a DNA polymerase are blended to form one or more second polymerase chain reaction mixtures, and the one or more second polymerase chain reaction mixtures are subjected to conditions suitable for digesting deoxyuracil (dU)-containing nucleic acid molecules present in the second polymerase chain reaction mixtures and for carrying out one or more polymerase chain reaction cycles comprising a denaturation treatment, a hybridization treatment, and an extension treatment thereby forming second polymerase chain reaction products. The method further involves detecting and distinguishing the second polymerase chain reaction products in the one or more second polymerase chain reaction mixtures to identify the presence of one or more parent nucleic acid molecules containing target nucleotide sequences differing from nucleotide sequences in other parent nucleic acid molecules in the sample by one or more methylated or hydroxymethylated residues.

[0029] Another aspect of the present application is directed to a method for identifying, in a sample, one or more parent nucleic acid molecules containing a target nucleotide sequence differing from nucleotide sequences in other parent nucleic acid molecules in the sample by one or more methylated or hydroxymethylated residues. The method involves providing a sample containing one or more parent nucleic acid molecules potentially containing the target nucleotide sequence differing from the nucleotide sequences in other parent nucleic acid molecules by one or more methylated or hydroxymethylated residues. The nucleic acid molecules in the sample are subjected to a treatment with one or more DNA repair enzymes and chemicals under conditions suitable to convert methylated and hydroxymethylated cytosine residues to dihydrouracil residues to produce a treated sample. One or more enzymes capable of digesting deoxyuracil (dU)-containing nucleic acid molecules are provided, and one or more first primary oligonucleotide primer(s) that comprises a nucleotide sequence that is complementary to a sequence in the parent nucleic acid molecule adjacent to the DNA repair enzyme and chemically-treated target nucleotide sequence containing the one or more methylated or hydroxymethylated residue are also provided. The treated sample, the one or more first primary oligonucleotide primers, the one or more enzymes capable of digesting deoxyuracil (dU)-containing nucleic acid molecules, a deoxynucleotide mix, and a DNA polymerase are blended to form one or more polymerase extension reaction mixtures. The one or more polymerase extension reaction mixtures are subjected to conditions suitable for digesting deoxyuracil (dU)-containing nucleic acid molecules present in the polymerase extension reaction mixtures and for carrying out one or more polymerase extension reaction cycles comprising a denaturation treatment, a hybridization treatment, and an extension treatment, thereby forming primary extension products comprising the complement of the DNA repair enzyme and chemically-treated target nucleotide sequence. The method further comprises providing one or more secondary oligonucleotide primer sets. Each secondary oligonucleotide primer set comprises (a) a first secondary oligonucleotide primer having a 5′ primer-specific portion and a 3′ portion that is complementary to a portion of the polymerase extension product formed from the first primary oligonucleotide primer and (b) a second secondary oligonucleotide primer having a 5′ primer-specific portion and a 3′ portion that comprises a nucleotide sequence that is complementary to a portion of an extension product formed from the first secondary oligonucleotide primer. The one or more polymerase extension reaction mixtures comprising the primary extension products, the one or more secondary oligonucleotide primer sets, the one or more enzymes capable of digesting deoxyuracil (dU)-containing nucleic acid molecules, a deoxynucleotide mix, and a DNA polymerase are blended to form one or more first polymerase chain reaction mixtures. The one or more first polymerase chain reaction mixtures are then subjected to conditions suitable for digesting deoxyuracil (dU)-containing nucleic acid molecules present in the first polymerase chain reaction mixtures, and conditions suitable for carrying out two or more polymerase chain reaction cycles comprising a denaturation treatment, a hybridization treatment, and an extension treatment, thereby forming first polymerase chain reaction products comprising a 5′ primer-specific portion of the first secondary oligonucleotide primer, a DNA repair enzyme and chemically-treated target nucleotide sequence-specific or complement sequence-specific portion, and a complement of the 5′ primer-specific portion of the second secondary oligonucleotide primer. The method further involves providing one or more tertiary oligonucleotide primer sets. Each tertiary oligonucleotide primer set comprises (a) a first tertiary oligonucleotide primer comprising the same nucleotide sequence as the 5′ primer-specific portion of the first polymerase chain reaction products and (b) a second tertiary oligonucleotide primer comprising a nucleotide sequence that is complementary to the 3′ primer-specific portion of the first polymerase chain reactions product sequence. The first polymerase chain reaction products, the one or more tertiary oligonucleotide primer sets, the one or more enzymes capable of digesting deoxyuracil (dU) containing nucleic acid molecules, a deoxynucleotide mix including dUTP, and a DNA polymerase are blended to form one or more second polymerase chain reaction mixtures. The one or more second polymerase chain reaction mixtures are subjected to conditions suitable for digesting deoxyuracil (dU)-containing nucleic acid molecules present in the second polymerase chain reaction mixtures and for carrying out one or more polymerase chain reaction cycles comprising a denaturation treatment, a hybridization treatment, and an extension treatment thereby forming second polymerase chain reaction products. The method further involves detecting and distinguishing the second polymerase chain reaction products in the one or more second polymerase chain reaction mixtures to identify the presence of one or more parent nucleic acid molecules containing target nucleotide sequences differing from nucleotide sequences in other parent nucleic acid molecules in the sample by one or more methylated or hydroxymethylated residues.

[0030] Another aspect of the present application is directed to a method for identifying, in a sample, one or more parent nucleic acid molecules containing a target nucleotide sequence differing from nucleotide sequences in other parent nucleic acid molecules in the sample by one or more methylated or hydroxymethylated residues. The method involves providing a sample containing one or more parent nucleic acid molecules potentially containing the target nucleotide sequence differing from the nucleotide sequences in other parent nucleic acid molecules by one or more methylated or hydroxymethylated residues. The nucleic acid molecules in the sample are subjected to a treatment with one or more DNA repair enzymes and chemicals under conditions suitable to convert methylated and hydroxymethylated cytosine residues to dihydrouracil residues to produce a treated sample. One or more enzymes capable of digesting deoxyuracil (dU)-containing nucleic acid molecules present in the sample are provided, and one or more primary oligonucleotide primer sets are provided. Each primary oligonucleotide primer set comprises (a) a first primary oligonucleotide primer that comprises a nucleotide sequence that is complementary to a sequence in the parent nucleic acid molecule adjacent to the DNA repair enzyme and chemically-treated target nucleotide sequence containing the one or more converted methylated or hydroxymethylated residue and (b) a second primary oligonucleotide primer that comprises a nucleotide sequence that is complementary to a portion of an extension product formed from the first primary oligonucleotide primer, wherein the first or second primary oligonucleotide primer further comprises a 5′ primer-specific portion. The treated sample, the one or more first primary oligonucleotide primers of the primer sets, the one or more enzymes capable of digesting deoxyuracil (dU)-containing nucleic acid molecules in the extension reaction mixture, a deoxynucleotide mix, and a DNA polymerase are blended to form one or more polymerase extension reaction mixtures. The one or more polymerase extension reaction mixtures are subjected to conditions suitable for digesting deoxyuracil (dU)-containing nucleic acid molecules present in the polymerase extension reaction mixtures and for carrying out one or more polymerase extension reaction cycles comprising a denaturation treatment, a hybridization treatment, and an extension treatment, thereby forming primary extension products comprising the complement of the DNA repair enzyme and chemically-treated target nucleotide sequence. The one or more polymerase extension reaction mixtures comprising the primary extension products, the one or more second primary oligonucleotide primers of the one or more primary oligonucleotide primer sets, the one or more enzymes capable of digesting deoxyuracil (dU)-containing nucleic acid molecules in the reaction mixture, a deoxynucleotide mix, and a DNA polymerase are blended to form one or more first polymerase chain reaction mixtures. The one or more first polymerase chain reaction mixtures are subjected to conditions suitable for carrying out one or more first polymerase chain reaction cycles comprising a denaturation treatment, a hybridization treatment, and an extension treatment, thereby forming first polymerase chain reaction products comprising the DNA repair enzyme and chemically-treated target nucleotide sequence or a complement thereof. The method further comprises providing one or more secondary oligonucleotide primer sets. Each secondary oligonucleotide primer set comprises (a) a first secondary oligonucleotide primer having a 3′ portion that is complementary to a portion of a first polymerase chain reaction product formed from the first primary oligonucleotide primer and (b) a second secondary oligonucleotide primer having a 3′ portion that comprises a nucleotide sequence that is complementary to a portion of a first polymerase chain reaction product formed from the first secondary oligonucleotide primer. The first polymerase chain reaction products, the one or more secondary oligonucleotide primer sets, the one or more enzymes capable of digesting deoxyuracil (dU)-containing nucleic acid molecules, a deoxynucleotide mix including dUTP, and a DNA polymerase are blended to form one or more second polymerase chain reaction mixtures. The one or more second polymerase chain reaction mixtures are subjected to conditions suitable for digesting deoxyuracil (dU)-containing nucleic acid molecules present in the second polymerase chain reaction mixtures and for carrying out two or more polymerase chain reaction cycles comprising a denaturation treatment, a hybridization treatment, and an extension treatment thereby forming second polymerase chain reaction products. The method further involves detecting and distinguishing the second polymerase chain reactions products in the one or more second polymerase chain reaction mixtures to identify the presence of one or more parent nucleic acid molecules containing target nucleotide sequences differing from nucleotide sequences in other parent nucleic acid molecules in the sample by one or more methylated or hydroxymethylated residues.

[0031] Another aspect of the present application is directed to a method for identifying, in a sample, one or more parent nucleic acid molecules containing a target nucleotide sequence differing from nucleotide sequences in other parent nucleic acid molecules in the sample by one or more methylated or hydroxymethylated residues. The method involves providing a sample containing one or more parent nucleic acid molecules potentially containing the target nucleotide sequence differing from the nucleotide sequences in other parent nucleic acid molecules by one or more methylated or hydroxymethylated residues. The nucleic acid molecules in the sample are subjected to a treatment with one or more DNA repair enzymes and chemicals under conditions suitable to convert methylated and hydroxymethylated cytosine residues to dihydrouracil residues to produce a treated sample. One or more enzymes capable of digesting deoxyuracil (dU)-containing nucleic acid molecules present in the sample are provided. One or more primary oligonucleotide primer sets are also provided. Each primary oligonucleotide primer set comprises (a) a first primary oligonucleotide primer having a 5′ primer-specific portion and a 3′ portion that comprises a nucleotide sequence that is complementary to a sequence in the parent nucleic acid molecule adjacent to the DNA repair enzyme and chemically-treated target nucleotide sequence containing the one or more converted methylated or hydroxymethylated residue and (b) a second primary oligonucleotide primer having a 5′ primer-specific portion and a 3′ portion that comprises a nucleotide sequence that is complementary to a portion of an extension product formed from the first primary oligonucleotide primer. The treated sample, the one or more first primary oligonucleotide primers of the one or more primary oligonucleotide primer sets, the one or more enzymes capable of digesting deoxyuracil (dU)-containing nucleic acid molecules, a deoxynucleotide mix, and a DNA polymerase are blended to form one or more polymerase extension reaction mixtures. The one or more polymerase extension reaction mixtures are subjected to conditions suitable for digesting deoxyuracil (dU)-containing nucleic acid molecules present in the polymerase extension reaction mixtures and for carrying out one or more polymerase extension reaction cycles comprising a denaturation treatment, a hybridization treatment, and an extension treatment, thereby forming primary extension products comprising the complement of the DNA repair enzyme and chemically-treated target nucleotide sequence. The one or more polymerase extension reaction mixtures comprising the primary extension products, the one or more second primary oligonucleotide primers of the one or more primary oligonucleotide primer sets, the one or more enzymes capable of digesting deoxyuracil (dU)-containing nucleic acid molecules in the reaction mixture, a deoxynucleotide mix, and a DNA polymerase are blended to form one or more first polymerase chain reaction mixtures. The method further comprises subjecting the one or more first polymerase chain reaction mixtures to conditions suitable for carrying out one or more first polymerase chain reaction cycles comprising a denaturation treatment, a hybridization treatment, and an extension treatment, thereby forming first polymerase chain reactions products comprising the DNA repair enzyme and chemically-treated target nucleotide sequence or a complement thereof. One or more secondary oligonucleotide primer sets are provided. Each secondary oligonucleotide primer set comprises (a) a first secondary oligonucleotide primer comprising the same nucleotide sequence as the 5′ primer-specific portion of the first polymerase chain reaction products or their complements and (b) a second secondary oligonucleotide primer comprising a nucleotide sequence that is complementary to the 3′ primer-specific portion of the first polymerase chain reaction products or their complements. The first polymerase chain reaction products, the one or more secondary oligonucleotide primer sets, the one or more enzymes capable of digesting deoxyuracil (dU)-containing nucleic acid molecules, a deoxynucleotide mix including dUTP, and a DNA polymerase are blended to form one or more second polymerase chain reaction mixtures. The one or more second polymerase chain reaction mixtures are subjected to conditions suitable for digesting deoxyuracil (dU)-containing nucleic acid molecules present in the second polymerase chain reaction mixtures and for carrying out one or more polymerase chain reaction cycles comprising a denaturation treatment, a hybridization treatment, and an extension treatment thereby forming second polymerase chain reaction products. The method further involves detecting and distinguishing the second polymerase chain reaction products in the one or more second polymerase chain reaction mixtures to identify the presence of one or more parent nucleic acid molecules containing target nucleotide sequences differing from nucleotide sequences in other parent nucleic acid molecules in the sample by one or more methylated or hydroxymethylated residues.

[0032] Another aspect of the present application is directed to a method of diagnosing or prognosing a disease state of cells or tissue based on identifying the presence or level of a plurality of disease-specific and/or cell/tissue-specific DNA, RNA, and/or protein markers in a biological sample of an individual. The plurality of markers is in a set comprising from 6-12 markers, 12-24 markers, 24-36 markers, 36-48 markers, 48-72 markers, 72-96 markers, or >96 markers. Each marker in a given set is selected by having any one or more of the following criteria: present, or above a cutoff level, in >50% of biological samples of the disease cells or tissue from individuals diagnosed with the disease state; absent, or below a cutoff level, in >95% of biological samples of the normal cells or tissue from individuals without the disease state; present, or above a cutoff level, in >50% of biological samples comprising cells, serum, blood, plasma, amniotic fluid, sputum, urine, bodily fluids, bodily secretions, bodily excretions, or fractions thereof, from individuals diagnosed with the disease state; absent, or below a cutoff level, in >95% of biological samples comprising cells, serum, blood, plasma, amniotic fluid, sputum, urine, bodily fluids, bodily secretions, bodily excretions, or fractions thereof, from individuals without the disease state; present with a z-value of >1.65 in the biological sample comprising cells, serum, blood, plasma, amniotic fluid, sputum, urine, bodily fluids, bodily secretions, bodily excretions, or fractions thereof, from individuals diagnosed with the disease state. At least 50% of the markers in a set each comprise one or more methylated or hydroxymethylated residues, and/or at least 50% of the markers in a set that are present, or above a cutoff level, or present with a z-value of >1.65 comprise of one or more methylated or hydroxymethylated residues, in the biological sample comprising cells, serum, blood, plasma, amniotic fluid, sputum, urine, bodily fluids, bodily secretions, bodily excretions, or fractions thereof, from at least 50% of individuals diagnosed with the disease state. The biological sample including cell-free DNA, RNA, and/or protein originating from the cells or tissue and from one or more other tissues or cells is obtained. The biological sample is selected from the group consisting of cells, serum, blood, plasma, amniotic fluid, sputum, urine, bodily fluids, bodily secretions, and bodily excretions, or fractions thereof. The sample is fractionated into one or more fractions, wherein at least one fraction comprises exosomes, tumor-associated vesicles, other protected states, or cell-free DNA, RNA, and/or protein. Nucleic acid molecules in one or more fractions are subjected to a treatment with one or more DNA repair enzymes and chemicals under conditions suitable to convert methylated and hydroxymethylated cytosine residues to dihydrouracil residues. At least one enrichment step is carried out for 50% or more disease-specific and/or cell/tissue-specific DNA, RNA, and/or protein markers during either said fractionating and/or by carrying out a nucleic acid amplification step. The method further involves performing one or more assays to detect and distinguish the plurality of disease-specific and/or cell/tissue-specific DNA, RNA, and/or protein markers, thereby identifying their presence or levels in the sample, wherein individuals are diagnosed or prognosed with the disease state if a minimum of 2 or 3 markers are present or above a cutoff level in a marker set comprising from 6-12 markers; or a minimum of 3, 4, or 5 markers are present or above a cutoff level in a marker set comprising from 12-24 markers; or a minimum of 3, 4, 5, or 6 markers are present or above a cutoff level in a marker set comprising from 24-36 markers; or a minimum of 4, 5, 6, 7, or 8 markers are present or above a cutoff level in a marker set comprising from 36-48 markers; or a minimum of 6, 7, 8, 9, 10, 11, or 12 markers are present or above a cutoff level in a marker set comprising from 48-72 markers, or a minimum of 7, 8, 9, 10, 11, 12 or 13 markers are present or above a cutoff level in a marker set comprising from 72-96 markers, or a minimum of 8, 9, 10, 11, 12, 13 or “n”/12 markers are present or above a cutoff level in a marker set comprising 96 to “n” markers, when “n”>168 markers.

[0033] Another aspect of the present application is directed to a method of diagnosing or prognosing a disease state of a solid tissue cancer including colorectal adenocarcinoma, stomach adenocarcinoma, esophageal carcinoma, breast lobular and ductal carcinoma, uterine corpus endometrial carcinoma, ovarian serous cystadenocarcinoma, cervical squamous cell carcinoma and adenocarcinoma, uterine carcinosarcoma, lung adenocarcinoma, lung squamous cell carcinoma, head & neck squamous cell carcinoma, prostate adenocarcinoma, invasive urothelial bladder cancer, liver hepatoceullular carcinoma, pancreatic ductal adenocarcinoma, or gallbladder adenocarcinoma, based on identifying the presence or level of a plurality of disease-specific and/or cell/tissue-specific DNA, RNA, and/or protein markers in a biological sample of an individual. The plurality of markers is in a set comprising from 48-72 total cancer markers, 72-96 total cancer markers or ≥96 total cancer markers. On average greater than one quarter such markers in a given set cover each of the aforementioned major cancers being tested. Each marker in a given set for a given solid tissue cancer is selected by having any one or more of the following criteria for that solid tissue cancer: present, or above a cutoff level, in >50% of biological samples of a given cancer tissue from individuals diagnosed with a given solid tissue cancer; absent, or below a cutoff level, in >95% of biological samples of the normal tissue from individuals without that given solid tissue cancer; present, or above a cutoff level, in >50% of biological samples comprising cells, serum, blood, plasma, amniotic fluid, sputum, urine, bodily fluids, bodily secretions, bodily excretions, or fractions thereof, from individuals diagnosed with a given solid tissue cancer; absent, or below a cutoff level, in >95% of biological samples comprising cells, serum, blood, plasma, amniotic fluid, sputum, urine, bodily fluids, bodily secretions, bodily excretions, or fractions thereof, from individuals without that given solid tissue cancer; present with a z-value of >1.65 in the biological sample comprising cells, serum, blood, plasma, amniotic fluid, sputum, urine, bodily fluids, bodily secretions, bodily excretions, or fractions thereof, from individuals diagnosed with a given solid tissue cancer. At least 50% of the markers in a set each comprise of one or more methylated residues, and/or at least 50% of the markers in a set that are present, or above a cutoff level, or present with a z-value of >1.65 comprise of one or more methylated residues, in the biological sample comprising cells, serum, blood, plasma, amniotic fluid, sputum, urine, bodily fluids, bodily secretions, and bodily excretions, or fractions thereof, from at least 50% of individuals diagnosed with a given solid tissue cancer, said method comprising. The method involves obtaining a biological sample, the biological sample including cell-free DNA, RNA, and/or protein originating from the cells or tissue and from one or more other tissues or cells. The biological sample is selected from the group consisting of cells, serum, blood, plasma, amniotic fluid, sputum, urine, bodily fluids, bodily secretions, and bodily excretions, or fractions thereof. The sample is fractionated into one or more fractions, wherein at least one fraction comprises exosomes, tumor-associated vesicles, other protected states, or cell-free DNA, RNA, and/or protein. The nucleic acid molecules in one or more fractions are subjected to a treatment with one or more DNA repair enzymes and chemicals under conditions suitable to convert methylated and hydroxymethylated cytosine residues to dihydrouracil residues. At least one enrichment step is carried out for 50% or more disease-specific and/or cell/tissue-specific DNA, RNA, and/or protein markers during either said fractionating and/or by carring out a nucleic acid amplification step. The method further involves performing one or more assays to detect and distinguish the plurality of cancer-specific and/or cell/tissue-specific DNA, RNA, and/or protein markers, thereby identifying their presence or levels in the sample, wherein individuals are diagnosed or prognosed with a solid-tissue cancer if a minimum of 4 markers are present or are above a cutoff level in a marker set comprising from 48-72 total cancer markers; or a minimum of 5 markers are present or are above a cutoff level in a marker set comprising from 72-96 total cancer markers; or a minimum of 6 or “n”/18 markers are present or are above a cutoff level in a marker set comprising 96 to “n” total cancer markers, when “n”>96 total cancer markers.

[0034] Another aspect of the present application is directed to a method of diagnosing or prognosing a disease state of and identifying the most likely specific tissue(s) of origin of a solid tissue cancer in the following groups: Group 1 (colorectal adenocarcinoma, stomach adenocarcinoma, esophageal carcinoma); Group 2 (breast lobular and ductal carcinoma, uterine corpus endometrial carcinoma, ovarian serous cystadenocarcinoma, cervical squamous cell carcinoma and adenocarcinoma, uterine carcinosarcoma); Group 3 (lung adenocarcinoma, lung squamous cell carcinoma, head & neck squamous cell carcinoma); Group 4 (prostate adenocarcinoma, invasive urothelial bladder cancer); and/or Group 5 (liver hepatoceullular carcinoma, pancreatic ductal adenocarcinoma, or gallbladder adenocarcinoma) based on identifying the presence or level of a plurality of disease-specific and/or cell/tissue-specific DNA, RNA, and/or protein markers in a biological sample of an individual. The plurality of markers is in a set comprises from 36-48 group-specific cancer markers, 48-64 group-specific cancer markers or 64 group-specific cancer markers, wherein on average greater than one third such markers in a given set cover each of the aforementioned cancers being tested within that group. Each marker in a given set for a given solid tissue cancer is selected by having any one or more of the following criteria for that solid tissue cancer: present, or above a cutoff level, in >50% of biological samples of a given cancer tissue from individuals diagnosed with a given solid tissue cancer; absent, or below a cutoff level, in >95% of biological samples of the normal tissue from individuals without that given solid tissue cancer; present, or above a cutoff level, in >50% of biological samples comprising cells, serum, blood, plasma, amniotic fluid, sputum, urine, bodily fluids, bodily secretions, bodily excretions, or fractions thereof, from individuals diagnosed with a given solid tissue cancer; absent, or below a cutoff level, in >95% of biological samples comprising cells, serum, blood, plasma, amniotic fluid, sputum, urine, bodily fluids, bodily secretions, bodily excretions, or fractions thereof, from individuals without that given solid tissue cancer; present with a z-value of >1.65 in the biological sample comprising cells, serum, blood, plasma, amniotic fluid, sputum, urine, bodily fluids, bodily secretions, bodily excretions, or fractions thereof, from individuals diagnosed with a given solid tissue cancer. At least 50% of the markers in a set each comprise one or more methylated residues, and/or at least 50% of the markers in a set that are present, or above a cutoff level, or present with a z-value of >1.65 comprise one or more methylated residues, in the biological sample comprising cells, serum, blood, plasma, amniotic fluid, sputum, urine, bodily fluids, bodily secretions, bodily excretions, or fractions thereof, from at least 50% of individuals diagnosed with a given solid tissue cancer. The method involves obtaining the biological sample, the biological sample including cell-free DNA, RNA, and/or protein originating from the cells or tissue and from one or more other tissues or cells. The biological sample is selected from the group consisting of cells, serum, blood, plasma, amniotic fluid, sputum, urine, bodily fluids, bodily secretions, and bodily excretions or fractions thereof. The sample is fractionated into one or more fractions, wherein at least one fraction comprises exosomes, tumor-associated vesicles, other protected states, or cell-free DNA, RNA, and/or protein. The nucleic acid molecules in one or more fractions are subjected to a treatment with one or more DNA repair enzymes and chemicals under conditions suitable to convert methylated and hydroxymethylated cytosine residues to dihydrouracil residues. At least one enrichment step is carried for 50% or more disease-specific and/or cell/tissue-specific DNA, RNA, and/or protein markers during either said fractionating and/or by carrying out a nucleic acid amplification step. The method further involves performing one or more assays to detect and distinguish the plurality of cancer-specific and/or cell/tissue-specific DNA, RNA, and/or protein markers, thereby identifying their presence or levels in the sample, wherein individuals are diagnosed or prognosed with a solid-tissue cancer if a minimum of 4 markers are present or are above a cutoff level in a marker set comprising from 36-48 group-specific cancer markers; or a minimum of 5 markers are present or are above a cutoff level in a marker set comprising from 48-64 group-specific cancer markers; or a minimum of 6 or “n”/12 markers are present or are above a cutoff level in a marker set comprising 64 to “n” group-specific cancer markers, when “n”>64 group-specific cancer markers.

[0035] Another aspect of the present application is directed to a method of diagnosing or prognosing a disease state of a gastrointestinal cancer including colorectal adenocarcinoma, stomach adenocarcinoma, or esophageal carcinoma, based on identifying the presence or level of a plurality of disease-specific and/or cell/tissue-specific DNA, RNA, and/or protein markers in a biological sample of an individual. The plurality of markers is in a set comprising from 6-12 markers, 12-18 markers, 18-24 markers, 24-36 markers, 36-48 markers or ≥48 markers. Each marker is selected by having any one or more of the following criteria for gastrointestinal cancer: present, or above a cutoff level, in >75% of biological samples of a given cancer tissue from individuals diagnosed with gastrointestinal cancer; absent, or below a cutoff level, in >95% of biological samples of the normal tissue from individuals without gastrointestinal cancer; present, or above a cutoff level, in >75% of biological samples comprising cells, serum, blood, plasma, amniotic fluid, sputum, urine, bodily fluids, bodily secretions, bodily excretions, or fractions thereof, from individuals diagnosed with gastrointestinal cancer; absent, or below a cutoff level, in >95% of biological samples comprising cells, serum, blood, plasma, amniotic fluid, sputum, urine, bodily fluids, bodily secretions, bodily excretions, or fractions thereof, from individuals without gastrointestinal cancer; present with a z-value of >1.65 in the biological sample comprising cells, serum, blood, plasma, amniotic fluid, sputum, urine, bodily fluids, bodily secretions, bodily excretions, or fractions thereof, from individuals diagnosed with gastrointestinal cancer. At least 50% of the markers in a set each comprise one or more methylated residues, and/or at least 50% of the markers in a set that are present, or above a cutoff level, or present with a z-value of >1.65 comprise one or more methylated residues, in the biological sample comprising cells, serum, blood, plasma, amniotic fluid, sputum, urine, bodily fluids, bodily secretions, bodily excretions, or fractions thereof, from at least 50% of individuals diagnosed with gastrointestinal cancer. The method involves obtaining the biological sample, the biological sample including cell-free DNA, RNA, and/or protein originating from the cells or tissue and from one or more other tissues or cells. The biological sample is selected from the group consisting of cells, serum, blood, plasma, amniotic fluid, sputum, urine, bodily fluids, bodily secretions, and bodily excretions, or fractions thereof. The sample is fractionated into one or more fractions, wherein at least one fraction comprises exosomes, tumor-associated vesicles, other protected states, or cell-free DNA, RNA, and/or protein. The nucleic acid molecules in one or more fractions are subjected to a treatment with one or more DNA repair enzymes and chemicals under conditions suitable to convert methylated and hydroxymethylated cytosine residues to dihydrouracil residues. At least one enrichment step is carried out for 50% or more disease-specific and/or cell/tissue-specific DNA, RNA, and/or protein markers during either said fractionating and/or by carrying out a nucleic acid amplification step. The method further involves performing one or more assays to detect and distinguish the plurality of cancer-specific and/or cell/tissue-specific DNA, RNA, and/or protein markers, thereby identifying their presence or levels in the sample, wherein individuals are diagnosed or prognosed with gastrointestinal cancer if a minimum of 2, 3 or 4 markers are present or are above a cutoff level in a marker set comprising from 6-12 markers; or a minimum of 2, 3, 4, or 5 markers are present or are above a cutoff level in a marker set comprising from 12-18 markers; or a minimum of 3, 4, 5, or 6 markers are present or are above a cutoff level in a marker set comprising from 18-24 markers; or a minimum of 3, 4, 5, 6, 7, or 8 markers are present or are above a cutoff level in a marker set comprising from 24-36 markers; or a minimum of 4, 5, 6, 7, 8, 9, or 10 markers are present or are above a cutoff level in a marker set comprising from 36-48 markers; or a minimum of 5, 6, 7, 8, 9, 10, 11, 12, or “n”/12 markers are present or are above a cutoff level in a marker set comprising 48 to “n” markers, when “n”>48 markers.

[0036] Another aspect of the present application is directed to a method of diagnosing or prognosing a disease state of a solid tissue cancer including colorectal adenocarcinoma, stomach adenocarcinoma, esophageal carcinoma, breast lobular and ductal carcinoma, uterine corpus endometrial carcinoma, ovarian serous cystadenocarcinoma, cervical squamous cell carcinoma and adenocarcinoma, uterine carcinosarcoma, lung adenocarcinoma, lung squamous cell carcinoma, head & neck squamous cell carcinoma, prostate adenocarcinoma, invasive urothelial bladder cancer, liver hepatoceullular carcinoma, pancreatic ductal adenocarcinoma, or gallbladder adenocarcinoma, based on identifying the presence or level of a plurality of disease-specific and/or cell/tissue-specific DNA, RNA, and/or protein markers in a biological sample of an individual. The plurality of markers is in a set comprising from 36-48 total cancer markers, 48-64 total cancer markers, or ≥64 total cancer markers, wherein on average greater than half of such markers in a given set cover each of the aforementioned major cancers being tested. Each marker in a given set for a given solid tissue cancer is selected by having any one or more of the following criteria for that solid tissue cancer: present, or above a cutoff level, in >75% of biological samples of a given cancer tissue from individuals diagnosed with a given solid tissue cancer; absent, or below a cutoff level, in >95% of biological samples of the normal tissue from individuals without that given solid tissue cancer; present, or above a cutoff level, in >75% of biological samples comprising cells, serum, blood, plasma, amniotic fluid, sputum, urine, bodily fluids, bodily secretions, bodily excretions, or fractions thereof, from individuals diagnosed with a given solid tissue cancer; absent, or below a cutoff level, in >95% of biological samples comprising cells, serum, blood, plasma, amniotic fluid, sputum, urine, bodily fluids, bodily secretions, bodily excretions, or fractions thereof, from individuals without that given solid tissue cancer; present with a z-value of >1.65 in the biological sample comprising cells, serum, blood, plasma, amniotic fluid, sputum, urine, bodily fluids, bodily secretions, bodily excretions, or fractions thereof, from individuals diagnosed with a given solid tissue cancer. At least 50% of the markers in a set each comprise one or more methylated residues, and/or at least 50% of the markers in a set that are present, or above a cutoff level, or present with a z-value of >1.65 comprise one or more methylated residues, in the biological sample comprising cells, serum, blood, plasma, amniotic fluid, sputum, urine, bodily fluids, bodily secretions, bodily excretions, or fractions thereof, from at least 50% of individuals diagnosed with a given solid tissue cancer. The method involves obtaining the biological sample, the biological sample including cell-free DNA, RNA, and/or protein originating from the cells or tissue and from one or more other tissues or cells. The biological sample is selected from the group consisting of cells, serum, blood, plasma, amniotic fluid, sputum, urine, bodily fluids, bodily secretions, and bodily excretions, or fractions thereof. The sample is fractionated into one or more fractions, wherein at least one fraction comprises exosomes, tumor-associated vesicles, other protected states, or cell-free DNA, RNA, and/or protein. The nucleic acid molecules in one or more fractions are subjected to a treatment with one or more DNA repair enzymes and chemicals under conditions suitable to convert methylated and hydroxymethylated cytosine residues to dihydrouracil residues. At least one enrichment step is carried out for 50% or more disease-specific and/or cell/tissue-specific DNA, RNA, and/or protein markers during either said fractionating step and/or carrying out a nucleic acid amplification step. The method further involves performing one or more assays to detect and distinguish the plurality of cancer-specific and/or cell/tissue-specific DNA, RNA, and/or protein markers, thereby identifying their presence or levels in the sample, wherein individuals are diagnosed or prognosed with a solid-tissue cancer if a minimum of 4 markers are present or are above a cutoff level in a marker set comprising from 36-48 total cancer markers; or a minimum of 5 markers are present or are above a cutoff level in a marker set comprising from 48-64 total cancer markers; or a minimum of 6 or “n”/12 markers are present or are above a cutoff level in a marker set comprising 64 to “n” total cancer markers, when “n”>64 total cancer markers.

[0037] Another aspect of the present application is directed to a method of diagnosing or prognosing a disease state of and identifying the most likely specific tissue(s) of origin of a solid tissue cancer in the following groups: Group 1 (colorectal adenocarcinoma, stomach adenocarcinoma, esophageal carcinoma); Group 2 (breast lobular and ductal carcinoma, uterine corpus endometrial carcinoma, ovarian serous cystadenocarcinoma, cervical squamous cell carcinoma and adenocarcinoma, uterine carcinosarcoma); Group 3 (lung adenocarcinoma, lung squamous cell carcinoma, head & neck squamous cell carcinoma); Group 4 (prostate adenocarcinoma, invasive urothelial bladder cancer); and/or Group 5 (liver hepatoceullular carcinoma, pancreatic ductal adenocarcinoma, or gallbladder adenocarcinoma) based on identifying the presence or level of a plurality of disease-specific and/or cell/tissue-specific DNA, RNA, and/or protein markers in a biological sample of an individual. The plurality of markers is in a set comprising from 24-36 group-specific cancer markers, 36-48 group-specific cancer markers, or ≥48 group-specific cancer markers. On average greater than one half of such markers in a given set cover each of the aforementioned cancers being tested within that group. Each marker in a given set for a given solid tissue cancer is selected by having any one or more of the following criteria for that solid tissue cancer: present, or above a cutoff level, in >75% of biological samples of a given cancer tissue from individuals diagnosed with a given solid tissue cancer; absent, or below a cutoff level, in >95% of biological samples of the normal tissue from individuals without that given solid tissue cancer; present, or above a cutoff level, in >75% of biological samples comprising cells, serum, blood, plasma, amniotic fluid, sputum, urine, bodily fluids, bodily secretions, bodily excretions, or fractions thereof, from individuals diagnosed with a given solid tissue cancer; absent, or below a cutoff level, in >95% of biological samples comprising cells, serum, blood, plasma, amniotic fluid, sputum, urine, bodily fluids, bodily secretions, bodily excretions, or fractions thereof, from individuals without that given solid tissue cancer; present with a z-value of >1.65 in the biological sample comprising cells, serum, blood, plasma, amniotic fluid, sputum, urine, bodily fluids, bodily secretions, bodily excretions, or fractions thereof, from individuals diagnosed with a given solid tissue cancer. At least 50% of the markers in a set each comprise one or more methylated residues, and/or at least 50% of the markers in a set that are present, or above a cutoff level, or present with a z-value of >1.65 comprise one or more methylated residues, in the biological sample comprising cells, serum, blood, plasma, amniotic fluid, sputum, urine, bodily fluids, bodily secretions, bodily excretions, or fractions thereof, from at least 50% of individuals diagnosed with a given solid tissue cancer. The method involves obtaining the biological sample, the biological sample including cell-free DNA, RNA, and/or protein originating from the cells or tissue and from one or more other tissues or cells. The biological sample is selected from the group consisting of cells, serum, blood, plasma, amniotic fluid, sputum, urine, bodily fluids, bodily secretions, and bodily excretions, or fractions thereof. The sample is fractionated into one or more fractions, wherein at least one fraction comprises exosomes, tumor-associated vesicles, other protected states, or cell-free DNA, RNA, and/or protein. The nucleic acid molecules in one or more fractions are subjected to a treatment with one or more DNA repair enzymes and chemicals under conditions suitable to convert methylated and hydroxymethylated cytosine residues to dihydrouracil residues. At least one enrichment step is carried out for 50% or more disease-specific and/or cell/tissue-specific DNA, RNA, and/or protein markers during either said fractionating step and/or by carrying out a nucleic acid amplification step. The method further involves performing one or more assays to detect and distinguish the plurality of cancer-specific and/or cell/tissue-specific DNA, RNA, and/or protein markers, thereby identifying their presence or levels in the sample, wherein individuals are diagnosed or prognosed with a solid-tissue cancer if a minimum of 4 markers are present or are above a cutoff level in a marker set comprising from 24-36 group-specific cancer markers; or a minimum of 5 markers are present or are above a cutoff level in a marker set comprising from 36-48 group-specific cancer markers; or a minimum of 6 or “n”/8 markers are present or are above a cutoff level in a marker set comprising 48 to “n” group-specific cancer markers, when “n”>48 group-specific cancer markers.

[0038] Another aspect of the present application is directed to a method of diagnosing or prognosing a disease state to guide and monitor treatment of a solid tissue cancer in one or more of the following groups: Group 1 (colorectal adenocarcinoma, stomach adenocarcinoma, esophageal carcinoma); Group 2 (breast lobular and ductal carcinoma, uterine corpus endometrial carcinoma, ovarian serous cystadenocarcinoma, cervical squamous cell carcinoma and adenocarcinoma, uterine carcinosarcoma); Group 3 (lung adenocarcinoma, lung squamous cell carcinoma, head & neck squamous cell carcinoma); Group 4 (prostate adenocarcinoma, invasive urothelial bladder cancer); and/or Group 5 (liver hepatoceullular carcinoma, pancreatic ductal adenocarcinoma, or gallbladder adenocarcinoma) based on identifying the presence or level of a plurality of disease-specific and/or cell/tissue-specific DNA, RNA, and/or protein markers in a biological sample of an individual. The plurality of markers is in a set comprising from 24-36 group-specific cancer markers, 36-48 group-specific cancer markers, or 48 group-specific cancer markers, wherein on average greater than one half of such markers in a given set cover each of the aforementioned cancers being tested within that group. Each marker in a given set for a given solid tissue cancer is selected by having any one or more of the following criteria for that solid tissue cancer: present, or above a cutoff level, in >75% of biological samples of a given cancer tissue from individuals diagnosed with a given solid tissue cancer; absent, or below a cutoff level, in >95% of biological samples of the normal tissue from individuals without that given solid tissue cancer; present, or above a cutoff level, in >75% of biological samples comprising cells, serum, blood, plasma, amniotic fluid, sputum, urine, bodily fluids, bodily secretions, bodily excretions, or fractions thereof, from individuals diagnosed with a given solid tissue cancer; absent, or below a cutoff level, in >95% of biological samples comprising cells, serum, blood, plasma, amniotic fluid, sputum, urine, bodily fluids, bodily secretions, bodily excretions, or fractions thereof, from individuals without that given solid tissue cancer; present with a z-value of >1.65 in the biological sample comprising cells, serum, blood, plasma, amniotic fluid, sputum, urine, bodily fluids, bodily secretions, bodily excretions, or fractions thereof, from individuals diagnosed with a given solid tissue cancer. At least 50% of the markers in a set each comprise of one or more methylated residues, and/or at least 50% of the markers in a set that are present, or above a cutoff level, or present with a z-value of >1.65 comprise of one or more methylated residues, in the biological sample comprising cells, serum, blood, plasma, amniotic fluid, sputum, urine, bodily fluids, bodily secretions, bodily excretions, or fractions thereof, from at least 50% of individuals diagnosed with a given solid tissue cancer. The method involves obtaining the biological sample, the biological sample including cell-free DNA, RNA, and/or protein originating from the cells or tissue and from one or more other tissues or cells. The biological sample is selected from the group consisting of cells, serum, blood, plasma, amniotic fluid, sputum, urine, bodily fluids, bodily secretions, and bodily excretions, or fractions thereof. The sample is fractionated into one or more fractions, wherein at least one fraction comprises exosomes, tumor-associated vesicles, other protected states, or cell-free DNA, RNA, and/or protein. The nucleic acid molecules in one or more fractions are subjected to a treatment with one or more DNA repair enzymes and chemicals under conditions suitable to convert methylated and hydroxymethylated cytosine residues to dihydrouracil residues. At least one enrichment step is carried out for 50% or more disease-specific and/or cell/tissue-specific DNA, RNA, and/or protein markers during either said fractionating step and/or by carrying out a nucleic acid amplification step. The method further involves performing one or more assays to detect and distinguish the plurality of cancer-specific and/or cell/tissue-specific DNA, RNA, and/or protein markers, thereby identifying their presence or levels in the sample, wherein individuals with a given tissue-specific cancer will on average have from approximately one-quarter to about one-half or more of the markers scored as present, or are above a cutoff level in the tested marker set, wherein to guide and monitor subsequent treatment, a portion or all of the identified markers scored as present or the identified markers scored as above a cutoff level in the tested marker set are deemed the “patient-specific marker set”, and retested on a subsequent biological sample from the individual during the treatment protocol, to monitor for loss of marker signal, wherein if a minimum of 3 markers remain present or remain above a cutoff level in a patient-specific marker set comprising from 12-24 markers; or if a minimum of 4 markers remain present or remain above a cutoff level in a patient-specific marker set comprising from 24-36 markers; or a minimum of 5 markers remain present or remain above a cutoff level in a patient-specific marker set comprising from 36-48 markers; or a minimum of 6 or “n”/8 markers remain present or remain above a cutoff level in a patient-specific marker set comprising ≥48 to “n” markers, when “n”>48 markers after the treatment protocol has been administered, then the continuing presence of said markers may guide a decision to change the cancer treatment therapy.

[0039] Another aspect of the present application is directed to a method of diagnosing or prognosing a disease state to monitor for recurrence of a solid tissue cancer in one or more of the following groups: Group 1 (colorectal adenocarcinoma, stomach adenocarcinoma, esophageal carcinoma); Group 2 (breast lobular and ductal carcinoma, uterine corpus endometrial carcinoma, ovarian serous cystadenocarcinoma, cervical squamous cell carcinoma and adenocarcinoma, uterine carcinosarcoma); Group 3 (lung adenocarcinoma, lung squamous cell carcinoma, head & neck squamous cell carcinoma); Group 4 (prostate adenocarcinoma, invasive urothelial bladder cancer); and/or Group 5 (liver hepatoceullular carcinoma, pancreatic ductal adenocarcinoma, or gallbladder adenocarcinoma) based on identifying the presence or level of a plurality of disease-specific and/or cell/tissue-specific DNA, RNA, and/or protein markers in a biological sample of an individual, wherein the plurality of markers is in a set comprising from 24-36 group-specific cancer markers, 36-48 group-specific cancer markers, or 48 group-specific cancer markers, wherein on average greater than one half of such markers in a given set cover each of the aforementioned cancers being tested within that group. Each marker in a given set for a given solid tissue cancer is selected by having any one or more of the following criteria for that solid tissue cancer: present, or above a cutoff level, in >75% of biological samples of a given cancer tissue from individuals diagnosed with a given solid tissue cancer; absent, or below a cutoff level, in >95% of biological samples of the normal tissue from individuals without that given solid tissue cancer; present, or above a cutoff level, in >75% of biological samples comprising cells, serum, blood, plasma, amniotic fluid, sputum, urine, bodily fluids, bodily secretions, bodily excretions, or fractions thereof, from individuals diagnosed with a given solid tissue cancer; absent, or below a cutoff level, in >95% of biological samples comprising cells, serum, blood, plasma, amniotic fluid, sputum, urine, bodily fluids, bodily secretions, bodily excretions, or fractions thereof, from individuals without that given solid tissue cancer; present with a z-value of >1.65 in the biological sample comprising cells, serum, blood, plasma, amniotic fluid, sputum, urine, bodily fluids, bodily secretions, bodily excretions, or fractions thereof, from individuals diagnosed with a given solid tissue cancer. At least 50% of the markers in a set each comprise of one or more methylated residues, and/or at least 50% of the markers in a set that are present, or above a cutoff level, or present with a z-value of >1.65 comprise of one or more methylated residues, in the biological sample comprising cells, serum, blood, plasma, amniotic fluid, sputum, urine, bodily fluids, bodily secretions, bodily excretions, or fractions thereof, from at least 50% of individuals diagnosed with a given solid tissue cancer. The method involves obtaining the biological sample, the biological sample including cell-free DNA, RNA, and/or protein originating from the cells or tissue and from one or more other tissues or cells, wherein the biological sample is selected from the group consisting of cells, serum, blood, plasma, amniotic fluid, sputum, urine, bodily fluids, bodily secretions, and bodily excretions, or fractions thereof. The sample is fractionated into one or more fractions, wherein at least one fraction comprises exosomes, tumor-associated vesicles, other protected states, or cell-free DNA, RNA, and/or protein. The nucleic acid molecules in one or more fractions are subjected to a treatment with one or more DNA repair enzymes and chemicals under conditions suitable to convert methylated and hydroxymethylated cytosine residues to dihydrouracil residues. At least one enrichment step is carried out for 50% or more disease-specific and/or cell/tissue-specific DNA, RNA, and/or protein markers during either said fractionating step and/or by carrying out a nucleic acid amplification step. The method further involves performing one or more assays to detect and distinguish the plurality of cancer-specific and/or cell/tissue-specific DNA, RNA, and/or protein markers, thereby identifying their presence or levels in the sample, wherein individuals with a given tissue-specific cancer will on average have from one-quarter to about one-half or more of the markers scored as present, or are above a cutoff level in the tested marker set, wherein to monitor for recurrence, a portion or all of the markers scored as being present, or the markers scored as above a cutoff level in the tested marker set are deemed the “patient-specific marker set”, and retested on subsequent biological samples from the individual after a successful treatment, to monitor for gain of marker signal, wherein if a minimum of 3 markers reappear or rise above a cutoff level in a patient-specific marker set comprising from 12-24 markers; or if a minimum of 4 markers reappear or rise above a cutoff level in a patient-specific marker set comprising from 24-36 markers; or a minimum of 5 markers reappear or rise above a cutoff level in a patient-specific marker set comprising from 36-48 markers; or a minimum of 6 or “n”/8 markers reappear or rise above a cutoff level in a patient-specific marker set comprising 48 to “n” markers, when “n”>48 markers after the treatment protocol has been administered, then the reappearance or rise or rise above a cutoff level in a patient-specific marker set may guide a decision to resume the cancer treatment therapy or change to a new cancer treatment therapy.

[0040] Another aspect of the present application is directed to a two-step method of diagnosing or prognosing a disease state of cells or tissue based on identifying the presence or level of a plurality of disease-specific and/or cell/tissue-specific DNA, RNA, and/or protein markers in a biological sample of an individual. The method involves obtaining a biological sample, the biological sample including exosomes, tumor-associated vesicles, markers within other protected states, cell-free DNA, RNA, and/or protein originating from the potentially disease state cells or tissue and from one or more other tissues or cells. The biological sample is selected from the group consisting of cells, serum, blood, plasma, amniotic fluid, sputum, urine, bodily fluids, bodily secretions, and bodily excretions, or fractions thereof. A first step is applied to the biological samples with an overall sensitivity of >80% and an overall specificity of >90% or an overall Z-score of >1.28 to identify individuals more likely to be diagnosed or prognosed with the disease state. A second step is then applied to biological samples from those individuals identified in the first step with an overall specificity of >95% or an overall Z-score of >1.65 to diagnose or prognose individuals with the disease state, wherein said applying the first step and/or said applying the second step is carried out using the methods described above.

[0041] The present application describes a number of approaches for detecting mutations, expression, splice variant, translocation, copy number, and/or methylation changes in target nucleic acid molecules using nuclease, ligase, and polymerase reactions. The present application solves the problems of carry over prevention, as well as allowing for spatial multiplexing to provide relative quantification, similar to digital PCR. Such technology may be utilized for non-invasive early detection of cancer, non-invasive prognosis of cancer, and monitoring for cancer recurrence from plasma or serum samples.

[0042] The present application provides a comprehensive roadmap of nucleic acid methylation, miRNA, lncRNA, ncRNA, mRNA Exons, as well as cancer-associated protein markers that are specific for solid-tissue cancers and matched normal tissues. The present application teaches the art of selecting the desired number of markers and types of markers for both pan-oncology and specific cancers (i.e. colorectal cancer) to guide the physician to improve the treatment of the patient. Details on primer design and optimized primer sequences are provided to enable rapid validation of these tests for both pan-oncology and specific cancers. The two-step procedure is designed to cast a wide net to initially identify most of the individuals harboring an early cancer, followed by a more stringent second step to improve specificity and narrow the patients to those most likely to harbor a hidden cancer, who are then sent for imaging and followup. The advantage of this 2-step approach is that it not only identifies the potential tissue of origin, but it is designed to provide the highest positive predictive value (PPV). Thus, when a result for a rare cancer comes back as presumptive positive (i.e. early ovarian cancer) the physician can focus her attention on providing imaging and followup to those patients who need it the most, while the test minimizes the false-positives that create unnecessary anxiety and unwanted invasive procedures.

[0043] The present application provides robust approaches for detecting methylation and hydroxymethylation markers of cancer using either qPCR or dPCR readout using protocols that are amenable to automation and work on readily available commercial instruments. The approach provides advantages in being integrated and convenient for laboratory setup, allowing for cost reduction, scalability, and fit with medical and laboratory flow in a CLIA-compatible automated setting. The benefit in lives saved world-wide would be of incalculable value.

### BRIEF DESCRIPTION OF THE DRAWINGS

[0044] FIGS. 1A-D illustrate a conditional logic tree for an early detection colorectal cancer test based on analysis of a patient's blood sample. FIG. 1A illustrates a one-step colorectal cancer assay using 12 markers at average sensitivity of 75%. FIG. 1B illustrates a two-step colorectal cancer assay using 12 markers at average sensitivity of 75% in the first step, and 24 markers at average sensitivity of 75% in the second step. FIG. 1C illustrates a one-step colorectal cancer assay using 18 markers at average sensitivity of 75%. FIG. 1D illustrates a two-step colorectal cancer assay using 18 markers at average sensitivity of 75% in the first step, and 36 markers at average sensitivity of 75% in the second step. FIGS. 1E-L illustrate a conditional logic tree for a two-step assay for early detection pan-oncology pan-oncology cancer test based on analysis of a patient's blood sample. FIG. 1E illustrates a two-step pan-oncology assay using 96 group-specific markers at average sensitivity of 50% in the first step, followed by 1 or 2 groups of 64 type-specific markers each at average sensitivity of 50% in the second step. FIG. 1F illustrates a two-step pan-oncology assay using 96 group-specific markers at average sensitivity of 50% in the first step, followed by 1 or 2 groups of 48 group-specific markers each at average sensitivity of 75% in the second step. FIG. 1G illustrates a two-step pan-oncology assay using 48 cancer-specific markers at average sensitivity of 75% in the first step, followed by 96 type-specific markers each at average sensitivity of 50% in the second step. FIG. 1H illustrates a two-step pan-oncology assay using 64 cancer-specific markers at average sensitivity of 75% in the first step, followed by 96 type-specific markers each at average sensitivity of 50% in the second step. FIG. 1I illustrates a two-step pan-oncology assay using 96 group-specific markers at average sensitivity of 66% in the first step, followed by 1 or 2 groups of 64 type-specific markers each at average sensitivity of 66% in the second step. FIG. 1J illustrates a two-step pan-oncology assay using 96 group-specific markers at average sensitivity of 66% in the first step, followed by 1 or 2 groups of 48 group-specific markers each at average sensitivity of 75% in the second step. FIG. 1K illustrates a two-step pan-oncology assay using 48 cancer-specific markers at average sensitivity of 75% in the first step, followed by 96 type-specific markers each at average sensitivity of 66% in the second step. FIG. 1L illustrates a two-step pan-oncology assay using 64 cancer-specific markers at average sensitivity of 75% in the first step, followed by 96 type-specific markers each at average sensitivity of 66% in the second step. FIG. 1M illustrates a conditional logic tree for a two-step assay to guide and monitor cancer treatment based on analysis of a patient's blood sample. The sample is analyzed with a targeted cancer-specific gene panel to identify mutations to guide therapy. Meanwhile the tumor or plasma is tested with 48 group-specific markers at average sensitivity of 75% to identify 12-24 markers specific to that patient. These markers are subsequently used to monitor treatment efficacy. FIG. 1N illustrates a conditional logic tree for a two-step assay to monitor for cancer recurrence based on analysis of a patient's blood sample. The tumor or plasma is tested with 48 group-specific markers at average sensitivity of 75% to identify 12-24 markers specific to that patient. After the patient is deemed cancer-free, these markers are used to identify early recurrence. Samples from patients that cross a threshold are then subjected to a targeted cancer-specific gene panel to verify presence of original mutations, and identify mutations to guide therapy and treat the recurrence.

[0045] FIG. 2 illustrates exPCR-LDR-qPCR carryover prevention reaction with Taqman™ detection to identify or relatively quantify target(s) and/or low-level mutations.

[0046] FIG. 3 illustrates exPCR-LDR-qPCR carryover prevention reaction with UniTaq detection to identify or relatively quantify target(s) and/or low-level mutations.

[0047] FIG. 4 illustrates a variation of exPCR-qPCR carryover prevention reaction with Taqman™ detection to identify or relatively quantify target(s) and/or low-level mutations.

[0048] FIG. 5 illustrates a variation of exPCR-qPCR carryover prevention reaction with UniTaq detection to identify or relatively quantify target(s) and/or low-level mutations.

[0049] FIG. 6 illustrates exPCR-LDR-qPCR carryover prevention reaction with Taqman™ detection to identify or relatively quantify low-level methylation.

[0050] FIG. 7 illustrates a variation of exPCR-LDR-qPCR carryover prevention reaction with Taqman™ detection to identify or relatively quantify low-level methylation.

[0051] FIG. 8 illustrates exPCR-qPCR carryover prevention reaction with Taqman™ detection to identify or relatively quantify low-level methylation.

[0052] FIG. 9 illustrates a variation of exPCR-qPCR carryover prevention reaction with Taqman™ detection to identify or relatively quantify low-level methylation.

[0053] FIG. 10 illustrates another variation of exPCR-qPCR carryover prevention reaction with Taqman™ detection to identify or relatively quantify low-level methylation.

[0054] FIG. 11 illustrates another variation of exPCR-qPCR carryover prevention reaction with Taqman™ detection to identify or relatively quantify low-level methylation.

[0055] FIG. 12 illustrates another variation of exPCR-qPCR carryover prevention reaction with Taqman™ detection to identify or relatively quantify low-level methylation.

[0056] FIG. 13 illustrates another variation of exPCR-LDR-qPCR carryover prevention reaction with Taqman™ detection to identify or relatively quantify low-level methylation.

[0057] FIG. 14 illustrates another variation of exPCR-LDR-qPCR carryover prevention reaction with Taqman™ detection to identify or relatively quantify low-level methylation.

[0058] FIG. 15 illustrates another variation of exPCR-qPCR carryover prevention reaction with Taqman™ detection to identify or relatively quantify low-level methylation.

[0059] FIG. 16 illustrates another variation of exPCR-qPCR carryover prevention reaction with Taqman™ detection to identify or relatively quantify low-level methylation.

[0060] FIG. 17 illustrates another variation of exPCR-qPCR carryover prevention reaction with Taqman™ detection to identify or relatively quantify low-level methylation.

[0061] FIG. 18 illustrates another variation of exPCR-qPCR carryover prevention reaction with Taqman™ detection to identify or relatively quantify low-level methylation.

[0062] FIG. 19 illustrates another variation of exPCR-qPCR carryover prevention reaction with Taqman™ detection to identify or relatively quantify low-level methylation.

[0063] FIGS. 20A-B illustrate results for calculated overall Sensitivity and Specificity for a 24-marker assay, where the average individual marker sensitivity is 50% (FIG. 20A), and the average individual marker false-positive rate is from 2% to 5% (FIG. 20B).

[0064] FIGS. 21A-B illustrate results for calculated overall Sensitivity and Specificity for a 36-marker assay, where the average individual marker sensitivity is 50% (FIG. 21A), and the average individual marker false-positive rate is from 2% to 5% (FIG. 21B).

[0065] FIGS. 22A-B illustrate results for calculated overall Sensitivity and Specificity for a 48-marker assay, where the average individual marker sensitivity is 50% (FIG. 22A), and the average individual marker false-positive rate is from 2% to 5% (FIG. 22B).

[0066] FIGS. 23A-B illustrate the ROC curve for a 48-marker assay, where the average individual marker sensitivity is 50%, as well as the calculated AUC, when the average number of molecules per marker in the blood ranges from 150 to 600 molecules. For FIGS. 23A and 23B, the calculations are based on an average individual marker false-positive rate of 2% and 3%, respectively.

[0067] FIGS. 24A-B illustrate the ROC curve for a 48-marker assay, where the average individual marker sensitivity is 50%, as well as the calculated AUC, when the average number of molecules per marker in the blood ranges from 150 to 600 molecules. For FIGS. 24A and 24B, the calculations are based on an average individual marker false-positive rate of 4% and 5%, respectively.

[0068] FIGS. 25A-B provide a list of blood-based, colon cancer-specific microRNA markers derived through analysis of TCGA microRNA datasets, which may be present in exosomes or other protected state in the blood.

[0069] FIGS. 26A-X provide a list of blood-based, colon cancer-specific ncRNA and lncRNA markers, which may be present in exosomes or other protected state in the blood.

[0070] FIGS. 27A-C provide a list of blood-based colon cancer-specific exon transcripts that may be enriched in exosomes or other protected states in the blood.

[0071] FIGS. 28A-J provide a list of cancer proteins markers, identified through, mRNA sequences, protein expression levels, protein product concentrations, cytokines, or autoantibody to the protein product arising from colorectal tumors, which may be identified in the blood, either within exosomes, other protected states, tumor-associated vesicles, or free within the plasma.

[0072] FIG. 29 provides a list of protein markers that can be secreted by colorectal tumors into the blood.

[0073] FIGS. 30A-Y provide a list of primary CpG sites that are colorectal cancer and Colon-tissue specific markers, that may be used to identify the presence of colorectal cancer from cfDNA, or DNA within exosomes, or DNA in another protected state (such as within CTCs) within the blood.

[0074] FIGS. 31A-P provide a list of chromosomal regions or sub-regions within which are primary CpG sites that are Colorectal Cancer and Colon-tissue specific markers, that may be used to identify the presence of colorectal cancer from cfDNA, or DNA within exosomes, or DNA in other protected states (such as within CTCs) within the blood.

[0075] FIGS. 32A-B illustrate results for calculated overall Sensitivity and Specificity for a 24-marker assay, where the average individual marker sensitivity is 66% (FIG. 32A), and the average individual marker false-positive rate is from 2% to 5% (FIG. 32B).

[0076] FIGS. 33A-B illustrate results for calculated overall Sensitivity and Specificity for a 36-marker assay, where the average individual marker sensitivity is 66% (FIG. 33A), and the average individual marker false-positive rate is from 2% to 5% (FIG. 33B).

[0077] FIGS. 34A-B illustrate results for calculated overall Sensitivity and Specificity for a 48-marker assay, where the average individual marker sensitivity is 66% (FIG. 34A), and the average individual marker false-positive rate is from 2% to 5% (FIG. 34B).

[0078] FIGS. 35A-B illustrate results for calculated overall Sensitivity and Specificity for a 12-marker assay, where the average individual marker sensitivity is 75% (FIG. 35A), and the average individual marker false-positive rate is from 2% to 5% (FIG. 35B).

[0079] FIGS. 36A-B illustrate results for calculated overall Sensitivity and Specificity for a 18-marker assay, where the average individual marker sensitivity is 75% (FIG. 36A), and the average individual marker false-positive rate is from 2% to 5% (FIG. 36B).

[0080] FIGS. 37A-B illustrate results for calculated overall Sensitivity and Specificity for a 24-marker assay, where the average individual marker sensitivity is 75% (FIG. 37A), and the average individual marker false-positive rate is from 2% to 5% (FIG. 37B).

[0081] FIGS. 38A-B illustrate results for calculated overall Sensitivity and Specificity for a 32-marker assay, where the average individual marker sensitivity is 75% (FIG. 38A), and the average individual marker false-positive rate is from 2% to 5% (FIG. 38B).

[0082] FIGS. 39A-B illustrate results for calculated overall Sensitivity and Specificity for a 36-marker assay, where the average individual marker sensitivity is 75% (FIG. 39A), and the average individual marker false-positive rate is from 2% to 5% (FIG. 39B).

[0083] FIGS. 40A-B illustrate results for calculated overall Sensitivity and Specificity for a 48-marker assay, where the average individual marker sensitivity is 75% (FIG. 40A), and the average individual marker false-positive rate is from 2% to 5% (FIG. 40B).

[0084] FIG. 41 provides a list of blood-based, solid tumor-specific ncRNA and lncRNA markers, which may be present in exosomes or other protected state in the blood.

[0085] FIGS. 42A-F provide a list of candidate blood-based solid tumor-specific exon transcripts that may be enriched in in exosomes or other protected state in the blood.

[0086] FIGS. 43A-H provide a list of cancer proteins markers, identified through, mRNA sequences, protein expression levels, protein product concentrations, cytokines, or autoantibody to the protein product arising from solid tumors, which may be identified in the blood, either within exosomes, other protected states, tumor-associated vesicles, or free within the plasma.

[0087] FIGS. 44A-S provide a list of primary CpG sites that are solid-tumor and tissue-specific markers, that may be used to identify the presence of solid-tumor cancer from cfDNA, or DNA within exosomes, or DNA in another protected state (such as within CTCs) within the blood.

[0088] FIGS. 45A-J provide a list of chromosomal regions or sub-regions within which are primary CpG sites that are solid-tumor and tissue-specific markers, that may be used to identify the presence of solid-tumor cancer from cfDNA, or DNA within exosomes, or DNA in another protected state (such as within CTCs) within the blood.

[0089] FIG. 46 provide a list of cancer proteins markers, identified through, mRNA sequences, protein expression levels, protein product concentrations, cytokines, or autoantibody to the protein product arising from colon adenocarcinoma, rectal adenocarcinoma, stomach adenocarcinoma, or esophageal carcinoma, which may be identified in the blood, either within exosomes, other protected states, tumor-associated vesicles, or free within the plasma.

[0090] FIGS. 47A-S provide a list of primary CpG sites that are colon adenocarcinoma, rectal adenocarcinoma, stomach adenocarcinoma, or esophageal carcinoma and tissue-specific markers, that may be used to identify the presence of solid-tumor cancer from cfDNA, or DNA within exosomes, or DNA in another protected state (such as within CTCs) within the blood.

[0091] FIGS. 48A-J provide a list of chromosomal regions or sub-regions within which are primary CpG sites that are colon adenocarcinoma, rectal adenocarcinoma, stomach adenocarcinoma, or esophageal carcinoma and tissue-specific markers, that may be used to identify the presence of solid-tumor cancer from cfDNA, or DNA within exosomes, or DNA in another protected state (such as within CTCs) within the blood.

[0092] FIGS. 49A-C provide a list of primary CpG sites that are breast lobular and ductal carcinoma, uterine corpus endometrial carcinoma, ovarian serous cystadenocarcinoma, cervical squamous cell carcinoma and adenocarcinoma, or uterine carcinosarcoma and tissue-specific markers, that may be used to identify the presence of solid-tumor cancer from cfDNA, or DNA within exosomes, or DNA in another protected state (such as within CTCs) within the blood.

[0093] FIGS. 50A-B provide a list of chromosomal regions or sub-regions within which are primary CpG sites that are breast lobular and ductal carcinoma, uterine corpus endometrial carcinoma, ovarian serous cystadenocarcinoma, cervical squamous cell carcinoma and adenocarcinoma, or uterine carcinosarcoma and tissue-specific markers, that may be used to identify the presence of solid-tumor cancer from cfDNA, or DNA within exosomes, or DNA in another protected state (such as within CTCs) within the blood.

[0094] FIG. 51 provides a list of primary CpG sites that are lung adenocarcinoma, lung squamous cell carcinoma, or head & neck squamous cell carcinoma and tissue-specific markers, that may be used to identify the presence of solid-tumor cancer from cfDNA, or DNA within exosomes, or DNA in another protected state (such as within CTCs) within the blood.

[0095] FIG. 52 provides a list of chromosomal regions or sub-regions within which are primary CpG sites that are lung adenocarcinoma, lung squamous cell carcinoma, or head & neck squamous cell carcinoma and tissue-specific markers, that may be used to identify the presence of solid-tumor cancer from cfDNA, or DNA within exosomes, or DNA in another protected state (such as within CTCs) within the blood.

[0096] FIG. 53 provides a list of primary CpG sites that are prostate adenocarcinoma or invasive urothelial bladder cancer and tissue-specific markers, that may be used to identify the presence of solid-tumor cancer from cfDNA, or DNA within exosomes, or DNA in another protected state (such as within CTCs) within the blood.

[0097] FIG. 54 provides a list of chromosomal regions or sub-regions within which are primary CpG sites that are prostate adenocarcinoma or invasive urothelial bladder cancer and tissue-specific markers, that may be used to identify the presence of solid-tumor cancer from cfDNA, or DNA within exosomes, or DNA in another protected state (such as within CTCs) within the blood.

[0098] FIG. 55 provides a list of blood-based, liver hepatoceullular carcinoma, pancreatic ductal adenocarcinoma, or gallbladder adenocarcinoma-specific ncRNA and lncRNA markers, which may be present in exosomes or other protected state in the blood.

[0099] FIGS. 56A-E provide a list of candidate blood-based liver hepatoceullular carcinoma, pancreatic ductal adenocarcinoma, or gallbladder adenocarcinoma-specific exon transcripts that may be enriched in in exosomes or other protected state in the blood.

[0100] FIGS. 57A-B provide a list of cancer proteins markers, identified through, mRNA sequences, protein expression levels, protein product concentrations, cytokines, or autoantibody to the protein product arising from liver hepatoceullular carcinoma, pancreatic ductal adenocarcinoma, or gallbladder adenocarcinoma, which may be identified in the blood, either within exosomes, other protected states, tumor-associated vesicles, or free within the plasma.

[0101] FIGS. 58A-E provide a list of primary CpG sites that are liver hepatoceullular carcinoma, pancreatic ductal adenocarcinoma, or gallbladder adenocarcinoma and tissue-specific markers, that may be used to identify the presence of solid-tumor cancer from cfDNA, or DNA within exosomes, or DNA in another protected state (such as within CTCs) within the blood.

[0102] FIGS. 59A-C provide a list of chromosomal regions or sub-regions within which are primary CpG sites that are liver hepatoceullular carcinoma, pancreatic ductal adenocarcinoma, or gallbladder adenocarcinoma and tissue-specific markers, that may be used to identify the presence of solid-tumor cancer from cfDNA, or DNA within exosomes, or DNA in another protected state (such as within CTCs) within the blood.

[0103] FIGS. 60A-D provide a list of primary CpG sites that are solid-tumor and tissue-specific markers, that may be used to identify the presence of solid-tumor cancer from cfDNA, or DNA within exosomes, or DNA in another protected state (such as within CTCs) within the blood.

[0104] FIGS. 61A-C provide a list of chromosomal regions or sub-regions within which are primary CpG sites that are solid-tumor and tissue-specific markers, that may be used to identify the presence of solid-tumor cancer from cfDNA, or DNA within exosomes, or DNA in another protected state (such as within CTCs) within the blood.

[0105] FIGS. 62A-D provide a list of primary CpG sites that are colon adenocarcinoma, rectal adenocarcinoma, stomach adenocarcinoma, or esophageal carcinoma and tissue-specific markers, that may be used to identify the presence of solid-tumor cancer from cfDNA, or DNA within exosomes, or DNA in another protected state (such as within CTCs) within the blood.

[0106] FIGS. 63A-D provide a list of chromosomal regions or sub-regions within which are primary CpG sites that are colon adenocarcinoma, rectal adenocarcinoma, stomach adenocarcinoma, or esophageal carcinoma and tissue-specific markers, that may be used to identify the presence of solid-tumor cancer from cfDNA, or DNA within exosomes, or DNA in another protected state (such as within CTCs) within the blood.

[0107] FIG. 64 provide a list of primary CpG sites that are breast lobular and ductal carcinoma, uterine corpus endometrial carcinoma, ovarian serous cystadenocarcinoma, cervical squamous cell carcinoma and adenocarcinoma, or uterine carcinosarcoma and tissue-specific markers, that may be used to identify the presence of solid-tumor cancer from cfDNA, or DNA within exosomes, or DNA in another protected state (such as within CTCs) within the blood.

[0108] FIG. 65 provide a list of chromosomal regions or sub-regions within which are primary CpG sites that are breast lobular and ductal carcinoma, uterine corpus endometrial carcinoma, ovarian serous cystadenocarcinoma, cervical squamous cell carcinoma and adenocarcinoma, or uterine carcinosarcoma and tissue-specific markers, that may be used to identify the presence of solid-tumor cancer from cfDNA, or DNA within exosomes, or DNA in another protected state (such as within CTCs) within the blood.

[0109] FIG. 66 provides a list of primary CpG sites that are lung adenocarcinoma, lung squamous cell carcinoma, or head & neck squamous cell carcinoma and tissue-specific markers, that may be used to identify the presence of solid-tumor cancer from cfDNA, or DNA within exosomes, or DNA in another protected state (such as within CTCs) within the blood.

[0110] FIG. 67 provides a list of chromosomal regions or sub-regions within which are primary CpG sites that are lung adenocarcinoma, lung squamous cell carcinoma, or head & neck squamous cell carcinoma and tissue-specific markers, that may be used to identify the presence of solid-tumor cancer from cfDNA, or DNA within exosomes, or DNA in another protected state (such as within CTCs) within the blood.

[0111] FIG. 68 provides a list of primary CpG sites that are prostate adenocarcinoma or invasive urothelial bladder cancer and tissue-specific markers, that may be used to identify the presence of solid-tumor cancer from cfDNA, or DNA within exosomes, or DNA in another protected state (such as within CTCs) within the blood.

[0112] FIG. 69 provides a list of chromosomal regions or sub-regions within which are primary CpG sites that are prostate adenocarcinoma or invasive urothelial bladder cancer and tissue-specific markers, that may be used to identify the presence of solid-tumor cancer from cfDNA, or DNA within exosomes, or DNA in another protected state (such as within CTCs) within the blood.

[0113] FIG. 70 provides a list of blood-based, liver hepatoceullular carcinoma, pancreatic ductal adenocarcinoma, or gallbladder adenocarcinoma-specific ncRNA and lncRNA markers, which may be present in exosomes or other protected state in the blood.

[0114] FIG. 71 provide a list of candidate blood-based liver hepatoceullular carcinoma, pancreatic ductal adenocarcinoma, or gallbladder adenocarcinoma-specific exon transcripts that may be enriched in in exosomes or other protected state in the blood.

### DETAILED DESCRIPTION

### A Universal Design for Early Detection of Cancer Using “Cancer Marker Load”

[0115] The most cost-effective early cancer detection test may combine an initial multiplexed coupled amplification and ligation assay to determine “cancer load”. For early cancer detection, this would achieve >95% sensitivity for all cancers (pan-oncology), at >97% specificity. These design principles may also be extended to include monitoring the efficacy of treatment, as well as detecting early cancer recurrence.

[0116] Several flow charts for cancer tumor load assays are illustrated in FIG. 1. In its simplest form, the assay would be a one-step assay to identify individuals with early colorectal cancer (CRC). A blood sample is fractionated into plasma and other components as needed, a set of 12 markers with average sensitivity of 75% are assayed, and the results are recorded (FIG. 1A). For example, an initial multiplexed PCR/LDR screening assay scoring for mutation, methylation, miRNA, mRNA, alternative splicing, and/or translocations identifies those samples with positive results. The physician is not concerned with which specific markers are positive but gives a simple directive. Those patients with 0-1 markers positive are told not to worry, go home, you are cancer-free. Those patients with ≥3 of 12 markers positive are directed to get a colonoscopy. Those patients with an intermediate number of positive markers (2) are instructed to come back in 3-6 months for retesting. Thus, the test is based on the overall cancer marker load and not dependent on the specific markers that teat positive.

[0117] In an advanced version of the test, a two-step assay would be performed to identify if the patient has colorectal cancer. The rationale for a two-step test is to initially cast a wide net to maximize sensitivity in identifying the most individuals with potential cancer, followed by a second step only on the positive samples (which contain both true and false-positives) to maximize specificity, eliminate virtually all the false-positives and hone in on those individuals most likely to have cancer. In the first step, a blood sample is fractionated into plasma and other components as needed, followed by an assay to interrogate an initial set of 12 markers with an average sensitivity of 75% (FIG. 1B). The first step assay can employ multiplexed PCR/LDR, or digital PCR screening to score for mutation, methylation, miRNA, mRNA, alternative splicing, and/or translocations events. As in the one-step assay, patients with 0-1 markers positive are presumed to be cancer-free. On the other hand, patients with ≥2 markers positive will undergo a second step, wherein 24 (new) markers with 75% sensitivity are assayed and scored as follows: 0-2 positive markers are considered cancer-free; 3 positive markers are advised to come back in 3-6 months for retesting; ≥4 positive markers are directed to go get a colonoscopy.

[0118] For higher accuracy of the one step CRC test, after fractionating the blood sample, a set of 18 markers with average sensitivity of 75% are assayed, and the results are recorded (FIG. 1C). Those patients with 0-2 markers positive are considered cancer-free; 3 positive markers are advised to come back in 3-6 months for retesting; ≥4 positive markers are directed to go get a colonoscopy.

[0119] For higher accuracy of the two step CRC test, after fractionating the blood sample, a set of 18 markers with average sensitivity of 75% are assayed, and the results are recorded (FIG. 1D). As in the one-step assay, patients with 0-2 markers positive are presumed to be cancer-free. On the other hand, patients with ≥3 markers positive will undergo a second step, wherein 36 (new) markers with 75% sensitivity are assayed and scored as follows: 0-3 positive markers are considered cancer-free; 4 positive markers are advised to come back in 3-6 months for retesting; ≥5 positive markers are directed to go get a colonoscopy.

[0120] In a pan-oncology version of the test, in the first step the assay would screen 96 markers, wherein on average ≥36 such markers would exhibit an average sensitivity of 50% for most major cancers (see FIG. 1E). These cancers would cluster to certain groups, which include: Group 1 (Colorectal, Stomach, Esophagus); Group 2 (Breast, Endometrial, Ovarian, Cervical, Uterine); Group 3 (Lung, Head & Neck); Group 4 (Prostate, Bladder), & Group 5 (Liver, Pancreatic, Gall Bladder). Patients with 0-4 markers positive are presumed to be cancer-free, while patients with ≥5 markers positive will undergo a second step. Presumptive positive samples are then assayed in the second step testing 1 or 2 groups, using 64 markers per group, wherein on average ≥36 such markers would exhibit an average sensitivity of 50% for each specific types of cancer within that group, including using tissue-specific markers to validate the initial result, and to identify tissue of origin. Results are scored as follows: 0-3 positive markers are considered cancer-free; 4 positive markers are advised to come back in 3-6 months for retesting; ≥5 positive markers are directed to go to imaging that matches the type(s) of cancer most likely to be the tissue of origin. For higher sensitivities, both the initial 96 markers in the first step, and the group-specific markers in the second step would have average sensitivity of 66% (FIG. 1I). The physician may then order targeted sequencing to further guide treatment decisions for the patient.

[0121] In a variation of the pan-oncology test, in the first step the assay would screen 96 markers, wherein on average ≥36 such markers would exhibit an average sensitivity of 50% for most major cancers (see FIG. 1F). Patients with 0-4 markers positive are presumed to be cancer-free, while patients with ≥5 markers positive will undergo a second step. Presumptive positive samples are then assayed in the second step testing 1 or 2 groups, using 48 markers per group, wherein on average ≥36 such markers would exhibit an average sensitivity of 75% for each specific types of cancer within that group. Results are scored as follows: 0-3 positive markers are considered cancer-free; 4 positive markers are advised to come back in 3-6 months for retesting; 5 positive markers are directed to go to imaging that matches the type(s) of cancer most likely to be the tissue of origin. These sets of group-specific markers may not always identify the exact tissue of origin, but they should narrow it down to a specific group. As an alternative approach to identifying the tissue of origin, methylation markers may be scored using targeted bisulfite sequencing, to access more or additional methylation markers, instead of, or in addition to the step 2 above. For higher sensitivities, the initial 96 markers in the first step would have average sensitivity of 66% (FIG. 1J). The physician may then order targeted sequencing to further guide treatment decisions for the patient.

[0122] In a more streamlined version of the pan-oncology test, in the first step the assay would screen 48 markers, wherein on average ≥24 such markers would exhibit an average sensitivity of 75% for most major cancers (a pan-oncology test, see FIG. 1G). Patients with 0-3 markers positive are presumed to be cancer-free, while patients with ≥4 markers positive will undergo a second step. For higher accuracy in the initial screen, the first step the assay would screen 64 markers, wherein on average ≥36 such markers would exhibit an average sensitivity of 75% for most major cancers (see FIG. 1H). Here, patients with 0-4 markers positive are presumed to be cancer-free, while patients with ≥5 markers positive will undergo a second step. Presumptive positive samples are then assayed in the second step using the 96 marker pan-oncology assay, wherein on average ≥36 such markers would exhibit an average sensitivity of 50% for each specific types of cancer within that group, including using tissue-specific markers to validate the initial result, and to identify tissue of origin. Results are scored as follows: 0-3 positive markers are considered cancer-free; 4 positive markers are advised to come back in 3-6 months for retesting; ≥5 positive markers are directed to go to imaging that matches the type(s) of cancer most likely to be the tissue of origin. For higher sensitivities, the 96 markers in the second step would have average sensitivity of 66% (FIGS. 1K & 1L). As an alternative approach to identifying the tissue of origin, methylation markers may be scored using targeted bisulfite sequencing, to access more or additional methylation markers, instead of, or in addition to the step 2 above. The physician may then order targeted sequencing to further guide treatment decisions for the patient.

[0123] The aforementioned 5 groups of 48 markers, with average sensitivity of 75% were designed to also be used to monitor treatment (see FIG. 1M). Currently, with a newly diagnosed cancer, cancer tissue (or liquid biopsy) is subjected to targeted sequencing to identify mutations or gene rearrangements that may be used to guide therapy. For a given cancer (i.e. stomach cancer in Group 1), the cancer tissue or liquid biopsy may be tested with the 48-marker group (1) panel. If the cancer had been identified in the first place using the 2-step screens identified in FIG. 1F or 1J, then they will have already undergone the 48-marker group specific test in step 2 of that assay. Of the 48 markers tested, on average 12-24 would be positive. These may then be bundled together in a patient-specific test to monitor treatment efficacy. The plasma of such a patient would be tested post surgery, and during the treatment regimen. The plasma is monitored for loss of the 12-24 marker signal, but if 3 positive markers remain positive, then this may guide the physician to change therapy.

[0124] The aforementioned 5 groups of 48 markers were designed to also be used to monitor for recurrence (see FIG. 1N). If the cancer had been identified in the first place using the 2-step screens identified in FIGS. 1F and 1J, and/or was monitored as described in FIG. 1M, then they will have already undergone the 48-marker group specific test, for which on average 12-24 would be positive. These may then be bundled together in a patient-specific test to monitor for recurrence. The plasma of such a patient who recovered from the original cancer would be monitored for gain of markers from the 12-24 marker panel. Results are scored as follows: 0-2 positive markers are considered cancer-free; ≥3 positive markers are directed to go to the second step. The plasma would be subjected to targeted sequencing to identify mutations or gene rearrangements that may be used to guide therapy of the recurrent tumor.

[0125] The present application is directed to a universal diagnostic approach that seeks to combine the best features of digital polymerase chain reaction (PCR), or quantitative polymerase chain reaction (qPCR), with using TET1 and pyridine-borane for conversion of 5mC (5-methyl cytosine) and 5hmC (5-hydroxy-methyl cytosine) to DHU (dihydrouracil) (Liu et al., “Bisulfite-Free Direct Detection of 5-Methylcytosine and 5-Hydroxymethylcytosine at Base Resolution,” Nat. Biotechnol. 37:424-429 (2019), which is hereby incorporated by reference in its entirety), ligation detection reaction (LDR), and quantitative detection of multiple disease markers, e.g., cancer markers.

### Multiplexing, Avoiding False-Positives, and Carryover Protection

[0126] There is a technical challenge of distinguishing true signal generated from the desired disease-specific nucleic acid differences vs. false signal generated from normal nucleic acids present in the sample vs. false signal generated in the absence of the disease-specific nucleic acid differences (i.e. somatic mutations).

[0127] A number of solutions to these challenges are presented below, but they share some common themes.

[0128] The first theme is multiplexing. PCR works best when primer concentration is relatively high, from 50 nM to 500 nM, limiting multiplexing. Further, the more PCR primer pairs added, the chances of amplifying incorrect products or creating primer-dimers increase exponentially. In contrast, for LDR probes, low concentrations on the order of 4 nM to 20 nM are used, and probe-dimers are limited by the requirement for adjacent hybridization on the target to allow for a ligation event. Use of low concentrations of gene-specific PCR primers or LDR probes containing universal primer sequence “tails” allows for subsequent addition of higher concentrations of universal primers to achieve proportional amplification of the initial PCR or LDR products. Another way to avoid or minimize false PCR amplicons or primer dimers is to use PCR primers containing a few extra bases and a blocking group, which is liberated to form a free 3′OH by cleavage with a nuclease only when hybridized to the target, e.g., a ribonucleotide base as the blocking group and RNase H2 as the cleaving nuclease.

[0129] The second theme is fluctuations in signal due to low input target nucleic acids. Often, the target nucleic acid originated from a few cells, either captured as CTCs, or from tumor cells that underwent apoptosis and released their DNA as small fragments (140-160 bp) in the serum. Under such conditions, it is preferable to perform some level of proportional amplification to avoid missing the signal altogether or reporting inaccurate copy number due to fluctuations when distributing small numbers of starting molecules into individual wells (for real-time, or droplet PCR quantification). As long as these initial amplifications are kept at a reasonable level (approximately 12 to 20 cycles), the risk of carryover contamination during opening of the tube and distributing amplicons for subsequent detection/quantification (using real-time, or droplet PCR) is minimized Other schemes use even lower amounts of limited amplifications (approximately 8 to 12 cycles).

[0130] The third theme is target-independent signal, also known as “No Template Control” (NTC). This arises from either polymerase or ligase reactions that occur in the absence of the correct target. Some of this signal may be minimized by judicious primer design. For ligation reactions, the 5′ 4 3′ nuclease activity of polymerase may be used to liberate the 5′ phosphate of the downstream ligation primer (only when hybridized to the target), so it is suitable for ligation. Further specificity for distinguishing presence of a low-level mutation using LDR may be achieved by: (i) using upstream mutation-specific LDR probes containing a mismatch in the 2^{nd} or 3^{rd} position from the 3′OH base, (ii) using LNA or PNA probes to wild-type sequence that would reduce hybridization of mutation-specific LDR probes to wild-type sequences, (iii) using LDR probes to wild-type sequence that (optionally) ligate but do not undergo additional amplification, and (iv) using upstream LDR probes containing a few extra bases and a blocking group, which is liberated to form a free 3′OH by cleavage with a nuclease only when hybridized to the complementary target (e.g., RNase H2 and a ribonucleotide base). Similar approaches for improving the specificity for distinguishing presence of a low-level mutation using PCR may be achieved by: (i) using mutation-specific PCR primers containing a mismatch in the 2^{nd} or 3^{rd} position from the 3′OH base, (ii) using LNA or PNA probes to wild-type sequence that would reduce hybridization of mutation-specific PCR primers to wild-type sequences, (iii) using PCR primers to wild-type sequence that are blocked and do not undergo additional amplification, and (iv) using upstream PCR primers containing a few extra bases and a blocking group, which is liberated to form a free 3′OH by cleavage with a nuclease only when hybridized to the complementary target (e.g., RNase H2 and a ribonucleotide base).

[0131] The fourth theme is either suppressed (reduced) amplification or incorrect (false) amplification due to unused primers in the reaction. One approach to eliminate such unused primers is to capture genomic or target or amplified target DNA on a solid support, allow ligation probes to hybridize and ligate, and then remove probes or products that are not hybridized. Alternative solutions include pre-amplification, followed by subsequent nested LDR and/or PCR steps, such that there is a second level of selection in the process.

[0132] The fifth theme is carryover prevention. Carryover signal may be eliminated by standard uracil incorporation during the universal PCR amplification step, and by using UDG (and optionally AP endonuclease) in the pre-amplification workup procedure. Incorporation of carryover prevention is central to the methods of the present application as described in more detail below. The initial PCR amplification is performed using incorporation of uracil. The LDR reaction is performed with LDR probes lacking uracil. Thus, when the LDR products are subjected to real-time PCR quantification, addition of UDG destroys the initial PCR products, but not the LDR products. Further, since LDR is a linear process and the tag primers use sequences absent from the human genome, accidental carryover of LDR products back to the original PCR will not cause template-independent amplification. Additional schemes to provide carryover prevention with methylated targets include use of restriction endonucleases to destroy unmethylated DNA prior to PCR amplification, or by capturing and enriching methylated DNA using methyl-specific DNA binding proteins or antibodies.

[0133] The sixth theme is achieving even amplification of many mutation-specific or methylation-specific targets in the multiplexed reaction. One approach, as already described above, is to perform limited initial PCR amplifications (8 to 12, or 12 to 20 cycles). However, sometimes different products amplify at different rates, especially when using mutation- or methylation-specific primers, or when using blocking LNA or PNA probes or other means to suppress amplification of wild-type DNA. This is because a regular PCR reaction has both forward and reverse primers working simultaneously. Although there may be preferential amplification using as an example a forward methylation-specific primer (i.e. after using TET1 and pyridine-borane treatment), the reverse primer will amplify both methylated and un-methylated DNA (again, after using TET1 and pyridine-borane treatment), and thus will magnify differences in initial rates of forward primer amplification. Further, and this also holds when using mutation-specific forward primers, the use of non-selecting reverse primers means that initial amplification products still contain substantial amounts of wild-type DNA sequence, which may lead to undesired false-positives in subsequent amplification steps. One approach is to perform an initial single-sided linear amplification, using primers that amplify only one strand of target DNA. This is particularly useful when amplifying TET1 and pyridine-borane-treated DNA, where the two resultant strands are no longer complementary to each other. An important variation of this theme destroys the initial target DNA after the linear amplification step. This may be achieved by incorporating one or more modified nucleotides, such as α-thio-dNTPs, that protect the initial extension products (but not the original cfDNA or genomic DNA) from exonuclease I digestion.

### Methods of Identifying Cancer Markers

[0134] A first aspect of the present application is directed to a method for identifying, in a sample, one or more parent nucleic acid molecules containing a target nucleotide sequence differing from nucleotide sequences of other parent nucleic acid molecules in the sample by one or more nucleotides, one or more copy numbers, one or more transcript sequences, and/or one or more methylated or hydroxymethylated residues. The method involves providing a sample containing one or more parent nucleic acid molecules potentially containing the target nucleotide sequence differing from the nucleotide sequences of other parent nucleic acid molecules by one or more nucleotides, one or more copy numbers, one or more transcript sequences, and/or one or more methylated or hydroxymethylated residues. One or more enzymes capable of digesting deoxyuracil (dU)-containing nucleic acid molecules are then provided. One or more primary oligonucleotide primer sets are also provided. Each primary oligonucleotide primer set comprises (a) a first primary oligonucleotide primer that comprises a nucleotide sequence that is complementary to a sequence in the parent nucleic acid molecule adjacent to the target nucleotide sequence and (b) a second primary oligonucleotide primer that comprises a nucleotide sequence that is complementary to a portion of an extension product formed from the first primary oligonucleotide primer, wherein the first or second primary oligonucleotide primer further comprises of a 5′ primer-specific portion. The sample, the one or more first primary oligonucleotide primers of the primer sets, the one or more enzymes capable of digesting deoxyuracil (dU)-containing nucleic acid molecules, a deoxynucleotide mix, and a DNA polymerase are blended to form one or more polymerase extension reaction mixtures. The one or more polymerase extension reaction mixtures are then subjected to conditions suitable for digesting deoxyuracil (dU)-containing nucleic acid molecules present in the polymerase extension reaction mixtures and for carrying out one or more polymerase extension reaction cycles. The one or more polymerase extension reaction cycles comprise a denaturation treatment, a hybridization treatment, and an extension treatment, thereby forming primary extension products comprising nucleotide sequences complementary to the target nucleotide sequence. The one or more polymerase extension reaction mixtures comprising the primary extension products, the one or more second primary oligonucleotide primers of the primary oligonucleotide primer sets, the one or more enzymes capable of digesting deoxyuracil (dU)-containing nucleic acid molecules in the reaction mixtures, a deoxynucleotide mix including dUTP, and a DNA polymerase are blended to form one or more first polymerase chain reaction mixtures. The method further comprises subjecting the one or more first polymerase chain reaction mixtures to conditions suitable for digesting deoxyuracil (dU)-containing nucleic acid molecules present in the polymerase chain reaction mixtures and for carrying out one or more first polymerase chain reaction cycles comprising a denaturation treatment, a hybridization treatment, and an extension treatment, thereby forming first polymerase chain reaction products comprising the target nucleotide sequence or a complement thereof. One or more oligonucleotide probe sets are then provided. Each probe set comprises (a) a first oligonucleotide probe having a 5′ primer-specific portion and a 3′ target sequence-specific portion, and (b) a second oligonucleotide probe having a 5′ target sequence-specific portion and a 3′ primer-specific portion, wherein the first and second oligonucleotide probes of a probe set are configured to hybridize, in a base specific manner, on a complementary target nucleotide sequence of a first polymerase chain reaction product. The first polymerase chain reaction products are blended with a ligase, and the one or more oligonucleotide probe sets to form one or more ligation reaction mixtures. The one or more ligation reaction mixtures are subjected to one or more ligation reaction cycles whereby the first and second oligonucleotide probes of the one or more oligonucleotide probe sets are ligated together, when hybridized to their complementary sequence, to form ligated product sequences in the ligation reaction mixtures wherein each ligated product sequence comprises the 5′ primer-specific portion, the target-specific portions, and the 3′ primer-specific portion. The method further includes providing one or more secondary oligonucleotide primer sets. Each secondary oligonucleotide primer set comprises (a) a first secondary oligonucleotide primer comprising the same nucleotide sequence as the 5′ primer-specific portion of the ligated product sequence and (b) a second secondary oligonucleotide primer comprising a nucleotide sequence that is complementary to the 3′ primer-specific portion of the ligated product sequence. The ligated product sequences, the one or more secondary oligonucleotide primer sets, the one or more enzymes capable of digesting deoxyuracil (dU)-containing nucleic acid molecules, a deoxynucleotide mix including dUTP, and a DNA polymerase are blended to form one or more second polymerase chain reaction mixtures. The one or more second polymerase chain reaction mixtures are subjected to conditions suitable for digesting deoxyuracil (dU)-containing nucleic acid molecules present in the second polymerase chain reaction mixtures and for carrying out one or more polymerase chain reaction cycles comprising a denaturation treatment, a hybridization treatment, and an extension treatment thereby forming second polymerase chain reaction products. The method further comprises detecting and distinguishing the second polymerase chain reaction products in the one or more second polymerase chain reaction mixtures to identify the presence of one or more parent nucleic acid molecules containing target nucleotide sequences differing from nucleotide sequences in other parent nucleic acid molecules in the sample by one or more nucleotides, one or more copy numbers, one or more transcript sequences, and/or one or more methylated or hydroxymethylated residues.

[0135] FIGS. 2 and 3 illustrate various embodiments of this aspect of the present application, abbreviated as exPCR-LDR-qPCR carryover prevention reaction to detect low-level mutations (exPCR is an abbreviation for one-sided extension using primers to one strand of a locus, followed by PCR—using either the same primers in the initial extension, or additional primers for the PCR step). Genomic or cfDNA is isolated (FIG. 2, step A), and the isolated DNA sample is treated with UDG to digest dU containing nucleic acid molecules that may be present in the sample (FIG. 2, step B). Suitable enzymes include, without limitation, E. coli uracil DNA glycosylase (UDG), Antarctic Thermolabile UDG, or Human single-strand-selective monofunctional uracil-DNA Glycosylase (hSMUG1). The regions of interest are selectively extended using locus-specific upstream primers, a blocking LNA or PNA probe comprising wild-type sequence, and a deoxynucleotide mix that includes dUTP. In this embodiment, another layer of selectivity can be incorporated into the method by including a 3′ cleavable blocking group (Blk 3′, e.g. C3 spacer), and an RNA base (r), in the upstream primer. Upon target-specific hybridization, RNase H (star symbol) removes the RNA base to liberate a 3′OH group which is a few bases upstream of the mutation, and suitable for polymerase extension (FIG. 2 or 3, step B; see e.g., Dobosy et. al. “RNase H-Dependent PCR (rhPCR): Improved Specificity and Single Nucleotide Polymorphism Detection Using Blocked Cleavable Primers,” BMC Biotechnology 11(80):1011 (2011), which is hereby incorporated by reference in its entirety). A blocking LNA or PNA probe comprising wild-type sequence that partially overlaps with the upstream PCR primer will preferentially compete in binding to wild-type sequence over the upstream primer, but not as much to mutant DNA, and thus suppresses extension of wild-type DNA during each round of primer extension. Sample is optionally aliquoted into 12, 24, 36, 48, or 96 wells prior to the initial extension step. Subsequently, the locus-specific downstream primers are added, followed by limited (8 to 20 cycles) or full (20-40 cycles) PCR. The downstream primers contain identical universal primer tails to prevent primer dimers. Further, such tails provide the option for including universal primer during the PCR step. This may assist in generating more equal amounts of products in a multiplexed PCR reaction. In an alternative embodiment, the initial extension products incorporate one or more modified nucleotides, such as α-thio-dNTPs, that protect the initial extension products (but not the original cfDNA or genomic DNA) from exonuclease I digestion. After exonuclease I digestion, the downstream locus-specific primers (containing identical universal primer tails) are added, again followed by limited (8 to 20 cycles) or full (20-40 cycles) PCR. The amplified products contain dU as shown in FIG. 2 or 3, step D, which allows for subsequent treatment with UDG or a similar enzyme for carryover prevention.

[0136] As shown in FIG. 2, step E, target-specific oligonucleotide probes are hybridized to the amplified products and ligase (filled circle) covalently seals the two oligonucleotides together when hybridized to their complementary sequence. In this embodiment, the upstream oligonucleotide probe having a sequence specific for detecting the mutation of interest further contains a 5′ primer-specific portion (Ai) to facilitate subsequent detection of the ligation product. Once again, the presence of blocking LNA or PNA probe comprising wild-type sequence suppresses ligation to wild-type target sequence if present after the enrichment of mutant sequence during the PCR amplification step. The downstream oligonucleotide probe, having a sequence common to both mutant and wild-type sequences contains a 3′ primer-specific portion (Ci′) that, together with the 5′ primer specific portion (Ai) of the upstream probe having a sequence specific for detecting the mutation, permit subsequent amplification and detection of only mutant ligation products. As illustrated in step E of FIG. 2, another layer of specificity can be incorporated into the method by including a 3′ cleavable blocking group (Blk 3′, e.g. C3 spacer), and an RNA base (r), in the upstream ligation probe. Upon target-specific hybridization, RNase H (star symbol) removes the RNA base to generate a ligation competent 3′OH group (FIG. 2, step D).

[0137] As shown in FIG. 2, step F, target-specific oligonucleotide probes are hybridized to the amplified products and ligase (filled circle) covalently seals the two oligonucleotides together when hybridized to their complementary sequence. The upstream oligonucleotide probe contains a 5′ primer-specific portion (Ai) and the downstream oligonucleotide probe contains a 3′ primer-specific portion (Ci′) that permits subsequent amplification of the ligation product. Following ligation, the ligation products are aliquoted into separate wells, micro-pores or droplets containing one or more tag-specific primer pairs, each pair comprising matched primers Ai and Ci, treated with UDG or similar enzyme to remove dU containing amplification products or contaminants, PCR amplified, and detected. As shown in FIG. 2, steps G & H, detection of the ligation product can be carried out using traditional TaqMan™ detection assay (see U.S. Pat. No. 6,270,967 to Whitcombe et al., and U.S. Pat. No. 7,601,821 to Anderson et al., which are hereby incorporated by reference in their entirety). For detection using TaqMan™ an oligonucleotide probe spanning the ligation junction is used in conjunction with primers suitable for hybridization on the primer-specific portions of the ligation products for amplification and detection. The TaqMan™ probe contains a fluorescent reporter group on one end (Fl) and a quencher molecule (Q) on the other end that are in close enough proximity to each other in the intact probe that the quencher molecule quenches fluorescence of the reporter group. During amplification, the TaqMan™ probe and upstream primer hybridize to their complementary regions of the ligation product. The 5′4 3′ nuclease activity of the polymerase extends the hybridized primer and liberates the fluorescent group of the TaqMan™ probe to generate a detectable signal (FIG. 2, step H). In a preferred embodiment, the Taqman probe contains a second quencher group (ZEN) about 9 bases in from the fluorescent reporter group, and the probe is designed such that the ZEN group is at or adjacent to the mutant base. Use of dUTP during the amplification reaction generates products containing dU, which can subsequently be destroyed using UDG for carryover prevention.

[0138] As shown in FIG. 3, step D, target-specific oligonucleotide probes are hybridized to the amplified products and ligase (filled circle) covalently seals the two oligonucleotides together when hybridized to their complementary sequence. In this embodiment, the upstream oligonucleotide probe having a sequence specific for detecting the mutation of interest further contains a 5′ primer-specific portion (Ai) to facilitate subsequent detection of the ligation product. Once again, the presence of blocking LNA or PNA probe comprising wild-type sequence suppresses ligation to wild-type target sequence if present after the enrichment of mutant sequence during the PCR amplification step. The downstream oligonucleotide probe, having a sequence common to both mutant and wild-type sequences contains a 3′ primer-specific portion (Bi-Ci′) that, together with the 5′ primer specific portion (Ai) of the upstream probe having a sequence specific for detecting the mutation, permit subsequent amplification and detection of only mutant ligation products. As illustrated in step D of FIG. 3, another layer of specificity can be incorporated into the method by including a 3′ cleavable blocking group (Blk 3′, e.g. C3 spacer), and an RNA base (r), in the upstream ligation probe. Upon target-specific hybridization, RNase H (star symbol) removes the RNA base to generate a ligation competent 3′OH group (FIG. 3, step D).

[0139] In this embodiment, the ligation probes are designed to contain UniTaq primer and tag sequences to facilitate detections. The UniTaq system is fully described in U.S. Patent Application Publication No. 2011/0212846 to Spier, which is hereby incorporated by reference in its entirety. The UniTaq system involves the use of three unique “tag” sequences, where at least one of the unique tag sequences (Ai) is present in the first oligonucleotide probe, and the second and third unique tag portions (Bi′ and Ci′) are in the second oligonucleotide probe sequence as shown in FIG. 3, step D & E. Upon ligation of oligonucleotide probes in a probe set, the resulting ligation product will contain the Ai sequence-target specific sequences-Bi′ sequence-Ci′ sequence. The essence of the UniTaq approach is that both oligonucleotide probes of a ligation probe set need to be correct in order to get a positive signal, which allows for highly multiplexed nucleic acid detection. For example, and as described herein, this is achieved by requiring hybridization of two parts, i.e., two of the tags, to each other.

[0140] Prior to detecting the ligation product, the sample is treated with UDG to destroy original target amplicons allowing only authentic ligation products to be detected. Following ligation, the ligation products are aliquoted into separate wells, micro-pores or droplets containing one or more tag-specific primer pairs. For the detection step, the ligation product containing Ai (a first primer-specific portion), Bi′ (a UniTaq detection portion), and Ci′ (a second primer-specific portion) is primed on both strands using a first oligonucleotide primer having the same nucleotide sequence as Ai, and a second oligonucleotide primer that is complementary to Ci′ (i.e., Ci). The first oligonucleotide primer also includes a UniTaq detection probe (Bi) that has a detectable label Fl on one end and a quencher molecule (Q) on the other end (Fl-Bi-Q-Ai). Optionally positioned proximal to the quencher is a polymerase-blocking unit, e.g., HEG, THF, Sp-18, ZEN, or any other blocker known in the art that is sufficient to stop polymerase extension. In another embodiment, a ZEN quencher group is also positioned about 9 bases from the fluorescent reporter group to assure more complete quenching. PCR amplification results in the formation of double stranded products as shown in FIG. 3, step G). In this example, a polymerase-blocking unit prevents a polymerase from copying the 5′ portion (Bi) of the first universal primer, such that the bottom strand of product cannot form a hairpin when it becomes single-stranded. Formation of such a hairpin would result in the 3′ end of the stem annealing to the amplicon such that polymerase extension of this 3′ end would terminate the PCR reaction.

[0141] The double stranded PCR products are denatured, and when the temperature is subsequently decreased, the upper strand of product forms a hairpin having a stem between the 5′ portion (Bi) of the first oligonucleotide primer and portion Bi′ at the opposite end of the strand (FIG. 3, step H). Also, during this step, the second oligonucleotide primer anneals to the 5′-primer specific portion (Ci′) of the hairpinned product. Upon extension of the second universal primer in step H, 5′ nuclease activity of the polymerase cleaves the detectable label D1 or the quencher molecule from the 5′ end of the amplicon, thereby increasing the distance between the label and the quencher and permitting detection of the label.

[0142] The ligation reaction used in the methods of the present application is well known in the art. Ligases suitable for ligating oligonucleotide probes of a probe set together (optionally following cleavage of a 3′ ribose and blocking group on the first oligonucleotide probe, or the 5′ flap on the second oligonucleotide probe) include, without limitation Thermus aquaticus ligase, E. coli ligase, T4 DNA ligase, T4 RNA ligase, Taq ligase, 9 N ligase, and Pyrococcus ligase, or any other thermostable ligase known in the art. In accordance with the present application, the nuclease-ligation process of the present application can be carried out by employing an oligonucleotide ligation assay (OLA) reaction (see Landegren, et al., “A Ligase-Mediated Gene Detection Technique,” Science 241:1077-80 (1988); Landegren, et al., “DNA Diagnostics—Molecular Techniques and Automation,” Science 242:229-37 (1988); and U.S. Pat. No. 4,988,617 to Landegren et al., which are hereby incorporated by reference in their entirety), a ligation detection reaction (LDR) that utilizes one set of complementary oligonucleotide probes (see e.g., WO 90/17239 to Barany et al., which is hereby incorporated by reference in its entirety), or a ligation chain reaction (LCR) that utilizes two sets of complementary oligonucleotide probes see e.g., WO 90/17239 to Barany et al., which is hereby incorporated by reference in its entirety).

[0143] The oligonucleotide probes of a probe sets can be in the form of ribonucleotides, deoxynucleotides, modified ribonucleotides, modified deoxyribonucleotides, peptide nucleotide analogues, modified peptide nucleotide analogues, modified phosphate-sugar-backbone oligonucleotides, nucleotide analogs, and mixtures thereof.

[0144] The hybridization step in the ligase detection reaction, which is preferably a thermal hybridization treatment, discriminates between nucleotide sequences based on a distinguishing nucleotide at the ligation junctions. The difference between the target nucleotide sequences can be, for example, a single nucleic acid base difference, a nucleic acid deletion, a nucleic acid insertion, or rearrangement. Such sequence differences involving more than one base can also be detected. Preferably, the oligonucleotide probe sets have substantially the same length so that they hybridize to target nucleotide sequences at substantially similar hybridization conditions.

[0145] Ligase discrimination can be further enhanced by employing various probe design features. For example, an intentional mismatch or nucleotide analogue (e.g., Inosine, Nitroindole, or Nitropyrrole) can be incorporated into the first oligonucleotide probe at the 2^{nd} or 3^{rd} base from the 3′ junction end to slightly destabilize hybridization of the 3′ end if it is perfectly matched at the 3′ end, but significantly destabilize hybridization of the 3′ end if it is mis-matched at the 3′ end. This design reduces inappropriate misligations when mutant probes hybridize to wild-type target. Alternatively, RNA bases that are cleaved by RNases can be incorporated into the oligonucleotide probes to ensure template-dependent product formation. For example, Dobosy et al., “RNase H-Dependent PCR (rhPCR): Improved Specificity and Single Nucleotide Polymorphism Detection Using Blocked Cleavable Primers,” BMC Biotechnology 11(80):1011 (2011), which is hereby incorporated by reference in its entirety, describes using an RNA-base close to the 3′ end of an oligonucleotide probe with 3′-blocked end, and cutting it with RNase H2 generating a PCR-extendable and ligatable 3′-OH. This approach can be used to generate either ligation-competent 3′OH (for standard DNA ligases), or 5′-P, or both, in the latter case, provided a ligase that can ligate 5′-RNA base is utilized.

[0146] Other possible modifications included abasic sites, e.g., internal abasic furan or oxo-G. These abnormal “bases” are removed by specific enzymes to generate ligation-competent 3′-OH or 5′P sites. Endonuclease IV, Tth EndolV (NEB) will remove abasic residues after the ligation oligonucleotides anneal to the target nucleic acid, but not from a single-stranded DNA. Similarly, one can use oxo-G with Fpg or inosine/uracil with EndoV or Thymine glycol with EndoVIII.

[0147] Ligation discrimination can also be enhanced by using the coupled nuclease-ligase reaction described in WO2013/123220 to Barany et al. or U.S. Patent Application Publication No. 2006/0234252 to Anderson et al., which are hereby incorporated by reference in their entirety. In this embodiment, the first oligonucleotide probe bears a ligation competent 3′ OH group while the second oligonucleotide probe bears a ligation incompetent 5′ end (i.e., an oligonucleotide probe without a 5′ phosphate). The oligonucleotide probes of a probe set are designed such that the 3′-most base of the first oligonucleotide probe is overlapped by the immediately flanking 5′-most base of the second oligonucleotide probe that is complementary to the target nucleic acid molecule. The overlapping nucleotide is referred to as a “flap”. When the overlapping flap nucleotide of the second oligonucleotide probe is complementary to the target nucleic acid molecule sequence and the same sequence as the terminating 3′ nucleotide of the first oligonucleotide probe, the phosphodiester bond immediately upstream of the flap nucleotide of the second oligonucleotide probe is discriminatingly cleaved by an enzyme having flap endonuclease (FEN) or 5′ nuclease activity. That specific FEN activity produces a novel ligation competent 5′ phosphate end on the second oligonucleotide probe that is precisely positioned alongside the adjacent 3′ OH of the first oligonucleotide probe to allow ligation of the two probes to occur. In accordance with this embodiment, flap endonucleases or 5′ nucleases that are suitable for cleaving the 5′ flap of the second oligonucleotide probe prior to ligation include, without limitation, polymerases with 5′ nuclease activity such as E. coli DNA polymerase and polymerases from Taq and T. thermophilus, as well as T4 RNase H. In another embodiment, the second probe of the probe set has a 3′ primer-specific portion, a target specific portion, and a 5′ nucleotide sequence, where the 5′ nucleotide sequence is complementary to at least a portion of the 3′ primer-specific portion, and where the 5′ nucleotide sequence hybridizes to its complementary portion of the 3′ primer-specific portion to form a hair-pinned second oligonucleotide probe when the second probe is not hybridized to a target nucleotide sequence.

[0148] For insertions or deletions, incorporation of a matched base or nucleotide analogues (e.g., -amino-dA or 5-propynyl-dC) in the first oligonucleotide probe at the 2^{nd} or 3rd position from the junction improves stability and may improve discrimination of such frameshift mutations from wild-type sequences. For insertions, use of one or more thiophosphate-modified nucleotides downstream from the desired scissile phosphate bond of the second oligonucleotide probe will prevent inappropriate cleavage by the 5′ nuclease enzyme when the probes are hybridized to wild-type DNA, and thus reduce false-positive ligation on wild-type target. Likewise, for deletions, use of one or more thiophosphate-modified nucleotides upstream from the desired scissile phosphate bond of the second oligonucleotide probe will prevent inappropriate cleavage by the 5′ nuclease enzyme when the probes are hybridized to wild-type DNA, and thus reduce false-positive ligation on wild-type target.

[0149] Another aspect of the present application is directed to a method for identifying, in a sample, one or more parent nucleic acid molecules containing a target nucleotide sequence differing from nucleotide sequences of other parent nucleic acid molecules in the sample by one or more nucleotides, one or more copy numbers, one or more transcript sequences, and/or one or more methylated or hydroxymethylated residues. The method involves providing a sample containing one or more parent nucleic acid molecules potentially containing the target nucleotide sequence differing from the nucleotide sequences of other parent nucleic acid molecules by one or more nucleotides, one or more copy numbers, one or more transcript sequences, and/or one or more methylated or hydroxymethylated residues. One or more enzymes capable of digesting deoxyuracil (dU)-containing nucleic acid molecules and one or more nucleases capable of digesting nucleic acid molecules present not comprising polymerase-incorporated modified nucleotides are provided. The method also involves providing one or more primary oligonucleotide primer sets. Each primary oligonucleotide primer set comprises (a) a first primary oligonucleotide primer that comprises a nucleotide sequence that is complementary to a sequence in the parent nucleic acid molecule adjacent to the target nucleotide sequence and (b) a second primary oligonucleotide primer that comprises a nucleotide sequence that is complementary to a portion of an extension product formed from the first primary oligonucleotide primer, wherein the first or second primary oligonucleotide primer further comprises a 5′ primer-specific portion. The sample, the one or more first primary oligonucleotide primers, the one or more enzymes capable of digesting deoxyuracil (dU)-containing nucleic acid molecules, a deoxynucleotide mix that comprises one or more modified nucleotides that protect extension products but not other DNA from nuclease digestion, and a DNA polymerase are blended to form one or more polymerase extension reaction mixtures. The one or more polymerase extension reaction mixtures are then subjected to conditions suitable for digesting deoxyuracil (dU)-containing nucleic acid molecules present in the polymerase extension reaction mixtures and for carrying out one or more polymerase extension reaction cycles comprising a denaturation treatment, a hybridization treatment, and an extension treatment, thereby forming primary extension products comprising modified nucleotide bases and comprising the complement of the target nucleotide sequence. The method comprises blending the one or more polymerase extension reaction mixtures comprising the primary extension products with the one or more nucleases. The one or more polymerase extension reaction mixtures comprising the primary extension products with the one or more nucleases are subjected to conditions suitable for digesting nucleic acid molecules but not primary extension products comprising modified nucleotides to produce one or more partially digested polymerase extension reaction mixtures. The method further comprises blending the one or more partially digested polymerase extension reaction mixtures, the one or more secondary primary oligonucleotide primers of the primer sets, a deoxynucleotide mix, and a DNA polymerase to form one or more first polymerase chain reaction mixtures. The one or more first polymerase chain reaction mixtures are subjected to conditions suitable for carrying out two or more first polymerase chain reaction cycles comprising a denaturation treatment, a hybridization treatment, and an extension treatment, thereby forming first polymerase chain reaction products comprising the target nucleotide sequence or a complement thereof. One or more secondary oligonucleotide primer sets are then provided. Each secondary oligonucleotide primer set comprises (a) a first secondary oligonucleotide primer having a 3′ portion that is complementary to a portion of an extension product formed from the first primary oligonucleotide primer and (b) a second secondary oligonucleotide primer having a 3′ portion that comprises a nucleotide sequence that is complementary to a portion of an extension product formed from the first secondary oligonucleotide primer. The first polymerase chain reaction products, the one or more secondary oligonucleotide primer sets, the one or more enzymes capable of digesting deoxyuracil (dU) containing nucleic acid molecules, a deoxynucleotide mix including dUTP, and a DNA polymerase are blended to form one or more second polymerase chain reaction mixtures. The one or more second polymerase chain reaction mixtures are subjected to conditions suitable for digesting deoxyuracil (dU)-containing nucleic acid molecules present in the second polymerase chain reaction mixtures and for carrying out two or more second polymerase chain reaction cycles comprising a denaturation treatment, a hybridization treatment, and an extension treatment thereby forming second polymerase chain reaction products. The method further comprises detecting and distinguishing the second polymerase chain reaction products in the one or more second polymerase chain reaction mixtures to identify the presence of one or more parent nucleic acid molecules containing target nucleotide sequences differing from nucleotide sequences in other parent nucleic acid molecules in the sample by one or more nucleotides, one or more copy numbers, one or more transcript sequences, and/or one or more methylated or hydroxymethylated residues.

[0150] The method also optionally involves providing one or more universal primers comprising the same nucleotide sequence as the 5′ primer-specific portion of one of the primary oligonucleotide primers.

[0151] In some embodiments, the second secondary oligonucleotide primer is substantially similar to or even identical to the first primary oligonucleotide primer.

[0152] FIGS. 4 and 5 illustrate various embodiments of this aspect of the present application.

[0153] FIG. 4 illustrates an exemplary exPCR-qPCR carryover prevention reaction to detect low-level mutations. Genomic or cfDNA is isolated (FIG. 4, step A), and the isolated DNA sample is treated with UDG to digest dU containing nucleic acid molecules that may be present in the sample (FIG. 4, step A). The sample is then subject to a linear amplification reaction, e.g., one or more polymerase extension reactions to generate complementary copies of mutation containing regions of interest. The regions of interest are selectively extended using locus-specific upstream primers, a blocking LNA or PNA probe comprising wild-type sequence, and a deoxynucleotide mix that includes one of more modified nucleotides. In this embodiment, another layer of selectivity can be incorporated into the method by including a 3′ cleavable blocking group (Blk 3′, e.g. C3 spacer), and an RNA base (r), in the upstream primer. Upon target-specific hybridization, RNase H (star symbol) removes the RNA base to liberate a 3′OH group which is a few bases upstream of the mutation, and suitable for polymerase extension (FIG. 4, step B). A blocking LNA or PNA probe comprising wild-type sequence that partially overlaps with the upstream PCR primer will preferentially compete in binding to wild-type sequence over the upstream primer, but not as much to mutant DNA, and thus suppresses extension of wild-type DNA during each round of primer extension. The initial extension products incorporate one or more modified nucleotides, such as α-thio-dNTPs, that protect the initial extension products (but not the original cfDNA or genomic DNA) from exonuclease I digestion (FIG. 4, step B). Optionally aliquot sample into 12, 24, 36, 48, or 96 wells prior to the initial extension step. The exonuclease I may be inactivated by a heat treatment (80 degrees C. for 20 minutes).

[0154] After the initial extension and exonuclease treatment, locus-specific primers comprising 5′ universal primer sequences and 3′ target-specific sequences, are added to enable limited cycle PCR. Optionally, one or more universal primers are also added. In this embodiment, another layer of selectivity can be incorporated into the method by including a 3′ cleavable blocking group (Blk 3′, e.g. C3 spacer), and an RNA base (r), in the upstream primer. Upon target-specific hybridization, RNase H (star symbol) removes the RNA base to liberate a 3′OH group which is a few bases upstream of the mutation, and suitable for polymerase extension (FIG. 4, step B).

[0155] There are several different types of blocking groups that prevent extension of the 3′ end of an oligonucleotide primer by polymerase, ranging from a simple dideoxynucleotide, to different spacer moieties such as Spacer 18 or Spacer C3, to common 3′ labels such as Biotin TEG or fluorescein, to one or more 2′-O-methyl uracil bases. Some of these moieties are known to provide resistance to digestion by exonuclease I (i.e. Spacer C3, [2′-O-methyl-U]4, or Biotin TEG), while others are known to be sensitive or only partially resistant (dideoxynucleotide, Spacer 18, or 3′-fluorescein). If a blocking group is used that permits exonuclease I digestion to also destroy the initial upstream primers, this allows for a controlled linear-linear type amplification. For example, if the initial extension generates 20 copies of each target molecule, then destroying the upstream primers prior to adding the downstream primers would allow generation of 400 copies of each target molecule. This approach has the advantage of providing a more even linear-linear amplification of multiple markers simultaneously. It may be used for the exPCR-qPCR strategies illustrated in FIGS. 4, 5, 10, 11, 12, 17, 18, and 19.

[0156] As shown in FIG. 4, step C, following the limited cycle PCR, the PCR products are aliquoted into separate wells, micro-pores or droplets containing one or more mutation-specific primers comprising 5′ primer-specific portions (Ai) (at low concentrations), locus-specific oligonucleotide primers comprising 5′ primer-specific portions (Ci) (at low concentrations), as well as matching tag-specific primers Ai and Ci, and mutation-specific Taqman probes (at higher concentrations). These primers combine to amplify the mutation-containing sequence, if present in the sample (FIG. 4, step C). In this embodiment, the upstream mutation-specific primer having a sequence specific for detecting the mutation of interest further contains a 5′ primer-specific portion (Ai) to facilitate subsequent detection of the nested PCR product. Once again, the presence of blocking LNA or PNA probe comprising wild-type sequence suppresses extension of wild-type target sequence if present after the enrichment of mutant sequence during the initial extension step. The reverse locus-specific primer, having a sequence common to both mutant and wild-type sequences contains a 5′ primer-specific portion (Ci) that, together with the 5′ primer specific portion (Ai) of the upstream primer having a sequence specific for detecting the mutation, permit subsequent amplification and detection of only mutant PCR products. As illustrated in step C of FIG. 4, another layer of specificity can be incorporated into the method by including a 3′ cleavable blocking group (Blk 3′, e.g. C3 spacer), and an RNA base (r), in the mutation-specific and locus-specific primers. Upon target-specific hybridization, RNase H (star symbol) removes the RNA base to generate a polymerase extension competent 3′OH group (FIG. 4, step C). In the initial primer extension (step B) the liberated 3′OH base is a few bases upstream from the mutation position, and thus would extend both wild-type and mutant sequences if cleaved (although the blocking LNA or PNA should limit cleavage of primer hybridized to wild-type sequence). In contrast, in the nested PCR (step C), the mutation-specific base of the primer is at the 3′OH base, such that extension on wild-type sequence would be less likely, since the base is mismatched. The specificity for polymerase extension of mutant over wild-type sequence may be further improved by: (i) using mutation-specific PCR Primers containing a mismatch in the 2^{nd} or 3^{rd} position from the 3′OH base, (ii) using LNA or PNA probes to wild-type sequence that would reduce hybridization of mutation-specific PCR primers to wild-type sequences, (iii) using PCR primers to wild-type sequence that are blocked and do not undergo additional amplification, and (iv) avoiding G:T or T:G mismatches between primer and wild-type sequence at the 3′OH base. Further, the longer target-specific primers are at a significantly lower concentration than the Taqman probe and tag-specific primers (Ai, Ci), such that the longer mutation-specific primers are depleted, allowing the Taqman probe and tag-specific primers to hybridize and enable target-dependent detection.

[0157] As shown in FIG. 4, step D, nested PCR products comprise a 5′ primer-specific portion (Ai) target-specific sequence, and a 3′ primer-specific portion (Ci′) that permits subsequent amplification of the nested PCR product. As shown in FIG. 4, steps E and F, detection of the nested PCR products can be carried out using traditional TaqMan™ detection assay, since the tag-specific primer pairs, each pair comprising matched primers Ai and Ci, and probes, are all present in the wells, micro-pores, or droplets (see U.S. Pat. No. 6,270,967 to Whitcombe et al., and U.S. Pat. No. 7,601,821 to Anderson et al., which are hereby incorporated by reference in their entirety). For detection using TaqMan™ an oligonucleotide probe spanning the mutation-specific region is used in conjunction with primers suitable for hybridization on the primer-specific portions of the nested PCR products for amplification and detection. The TaqMan™ probe contains a fluorescent reporter group on one end (Fl) and a quencher molecule (Q) on the other end that are in close enough proximity to each other in the intact probe that the quencher molecule quenches fluorescence of the reporter group. During amplification, the TaqMan™ probe and upstream primer hybridize to their complementary regions of the nested PCR product. The 5′→3′ nuclease activity of the polymerase extends the hybridized primer and liberates the fluorescent group of the TaqMan™ probe to generate a detectable signal (FIG. 4, step F). In a preferred embodiment, the Taqman probe contains a second quencher group (ZEN) about 9 bases in from the fluorescent reporter group, and the probe is designed such that the ZEN group is at or adjacent to the mutant base. Use of dUTP during the amplification reaction generates products containing dU, which can subsequently be destroyed using UDG for carryover prevention.

[0158] FIG. 5 illustrates an another exPCR-qPCR carryover prevention reaction to detect low-level mutations. Genomic or cfDNA is isolated (FIG. 5, step A), and the isolated DNA sample is treated with UDG to digest dU containing nucleic acid molecules that may be present in the sample (FIG. 5, step A). The sample is then subject to a linear amplification reaction, e.g., one or more polymerase extension reactions to generate complementary copies of mutation containing regions of interest. The regions of interest are selectively extended using locus-specific upstream primers, a blocking LNA or PNA probe comprising wild-type sequence, and a deoxynucleotide mix that includes one of more modified nucleotides. In this embodiment, another layer of selectivity can be incorporated into the method by including a 3′ cleavable blocking group (Blk 3′, e.g. C3 spacer), and an RNA base (r), in the upstream primer. Upon target-specific hybridization, RNase H (star symbol) removes the RNA base to liberate a 3′OH group which is a few bases upstream of the mutation, and suitable for polymerase extension (FIG. 5, step B). A blocking LNA or PNA probe comprising wild-type sequence that partially overlaps with the upstream PCR primer will preferentially compete in binding to wild-type sequence over the upstream primer, but not as much to mutant DNA, and thus suppresses extension of wild-type DNA during each round of primer extension. The sample is optionally aliquoted into 12, 24, 36, 48, or 96 wells prior to the initial extension step.

[0159] The initial extension products incorporate one or more modified nucleotides, such as α-thio-dNTPs, that protect the initial extension products (but not the original cfDNA or genomic DNA) from exonuclease I digestion (FIG. 5, step B). Using just upstream locus-specific primers in the presence of blocking LNA or PNA probes enriches for extension of mutation-containing products with each extension cycle. The exonuclease digestion destroys wild-type DNA present in the original genomic or cfDNA sample, and thus the enriched extension products will not be diluted by subsequent extension or amplification off original wild-type DNA (see step C below). The exonuclease I may be inactivated by a heat treatment (80 degrees C. for 20 minutes).

[0160] After the initial extension and exonuclease treatment, locus-specific primers comprising 5′ universal primer sequences and 3′ target-specific sequences, are added to enable limited cycle PCR. Optionally, one or more universal primers are also added. In this embodiment, another layer of selectivity can be incorporated into the method by including a 3′ cleavable blocking group (Blk 3′, e.g. C3 spacer), and an RNA base (r), in the upstream primer. Upon target-specific hybridization, RNase H (star symbol) removes the RNA base to liberate a 3′OH group which is a few bases upstream of the mutation, and suitable for polymerase extension (FIG. 4, step B). If the exonuclease I digestion had also destroyed the initial upstream primers, they may be re-added after heat inactivation of the exonuclease, and prior to the limited cycle PCR step.

[0161] As shown in FIG. 5, step C, following the limited cycle PCR, the PCR products are aliquoted into separate wells, micro-pores or droplets containing one or more mutation-specific primers comprising 5′ primer-specific portions (Ai) (at low concentrations), locus-specific oligonucleotide primers comprising 5′ primer-specific portions (Bi-Ci) (at low concentrations), as well as matching tag-specific primers Fl-Bi-Q-Ai and Ci (at higher concentrations). These primers combine to amplify the mutation-containing sequence, if present in the sample (FIG. 5, step C). In this embodiment, the upstream mutation-specific primer having a sequence specific for detecting the mutation of interest further contains a 5′ primer-specific portion (Ai) to facilitate subsequent detection of the nested PCR product. Once again, the presence of blocking LNA or PNA probe comprising wild-type sequence suppresses extension of wild-type target sequence if present after the enrichment of mutant sequence during the initial extension step. The reverse locus-specific primer, having a sequence common to both mutant and wild-type sequences contains a 3′ primer-specific portion (Bi-Ci) that, together with the 5′ primer specific portion (Ai) of the upstream primer having a sequence specific for detecting the mutation, permit subsequent amplification and detection of only mutant PCR products. As illustrated in step C of FIG. 5, another layer of specificity can be incorporated into the method by including a 3′ cleavable blocking group (Blk 3′, e.g. C3 spacer), and an RNA base (r), in the mutation-specific and locus-specific primers. Upon target-specific hybridization, RNase H (star symbol) removes the RNA base to generate a polymerase extension competent 3′OH group (FIG. 5, step C). In the initial primer extension (step B) the liberated 3′OH base is a few bases upstream from the mutation position, and thus would extend both wild-type and mutant sequences if cleaved (although the blocking LNA or PNA should limit cleavage of primer hybridized to wild-type sequence). In contrast, in the nested PCR (step C), the mutation-specific base of the primer is at the 3′OH base, such that extension on wild-type sequence would be less likely, since the base is mismatched. The specificity for polymerase extension of mutant over wild-type sequence may be further improved by: (i) using mutation-specific PCR Primers containing a mismatch in the 2^{nd} or 3^{rd} position from the 3′OH base, (ii) using LNA or PNA probes to wild-type sequence that would reduce hybridization of mutation-specific PCR primers to wild-type sequences, (iii) using PCR primers to wild-type sequence that are blocked and do not undergo additional amplification, and (iv) avoiding G:T or T:G mismatches between primer and wild-type sequence at the 3′OH base. Further, the longer target-specific primers are at a significantly lower concentration than the UniTaq primers (Fl-Bi-Q-Ai, Ci), such that the longer mutation-specific primers are depleted, allowing the UniTaq primers to hybridize and enable target-dependent detection.

[0162] As shown in FIG. 5, step D, nested PCR products comprise a 5′ primer-specific portion (Ai) target-specific sequence, and a 3′ primer-specific portion (Bi′-Ci′) that permits subsequent amplification of the nested PCR product. Following the limited cycle PCR, detection of the nested PCR products can be carried out using the UniTaq method, since the one or more tag-specific primer pairs, each pair comprising matched primers Fl-Bi-Q-Ai and Ci, are all present in the wells, micro-pores, or droplets. PCR amplification results in the formation of double stranded products as shown in FIG. 5, step D. In this example, a polymerase-blocking unit prevents a polymerase from copying the 5′ portion (Bi) of the first universal primer, such that the bottom strand of product cannot form a hairpin when it becomes single-stranded. Formation of such a hairpin would result in the 3′ end of the stem annealing to the amplicon such that polymerase extension of this 3′ end would terminate the PCR reaction.

[0163] The double stranded PCR products are denatured, and when the temperature is subsequently decreased, the upper strand of product forms a hairpin having a stem between the 5′ portion (Bi) of the first oligonucleotide primer and portion Bi′ at the opposite end of the strand (FIG. 5, step G). Also, during this step, the second oligonucleotide primer anneals to the 5′-primer specific portion (Ci′) of the hairpinned product. Upon extension of the second universal primer in step G, 5′ nuclease activity of the polymerase cleaves the detectable label D1 or the quencher molecule from the 5′ end of the amplicon, thereby increasing the distance between the label and the quencher and permitting detection of the label. Use of dUTP during the amplification reaction generates products containing dU, which can subsequently be destroyed using UDG for carryover prevention.

[0164] The aforementioned examples in FIGS. 2-5 describe the method for identifying low-level mutations, or quantifying copy number, or enumerating the number of target molecules in a sample containing cfDNA or genomic DNA. These methods may also be extended to identify the presence of mutations in mRNA, or quantifying the relative abundance, or enumerating the number of target mRNA, lncRNA, or miRNA in a sample. In this embodiment, mRNA is isolated, and treated with UDG for carryover prevention. cDNA is generated using 3′ transcript-specific primers and reverse-transcriptase in the presence of dUTP. Suitable reverse transcriptases include but are not limited to Moloney Murine Leukemia Virus Reverse Transcriptase (M-MLV RT, New England Biolabs), or Superscript II or III Reverse Transcriptase (Life Technologies). This step provides a single linear copy of each target RNA template. Subsequently, Taq polymerase may be activated to perform limited cycle PCR amplification to maintain relative ratios of different amplicons, with target mutations, copy number or molecules detected as described supra for FIG. 2, 3, 4, or 5, or using other suitable means known in the art.

[0165] Another aspect of the present application is directed to a method for identifying, in a sample, one or more parent nucleic acid molecules containing a target nucleotide sequence differing from nucleotide sequences in other parent nucleic acid molecules in the sample by one or more methylated or hydroxymethylated residues. The method involves providing a sample containing one or more parent nucleic acid molecules potentially containing the target nucleotide sequence differing from the nucleotide sequences in other parent nucleic acid molecules by one or more methylated or hydroxymethylated residues and subjecting the nucleic acid molecules in the sample to a treatment with one or more DNA repair enzymes and chemicals under conditions suitable to convert methylated and hydroxymethylated cytosine residues to dihydrouracil residues to produce a treated sample. One or more enzymes capable of digesting deoxyuracil (dU)-containing nucleic acid molecules are then provided. The method further involves providing one or more primary oligonucleotide primer sets. Each primary oligonucleotide primer set comprises (a) a first primary oligonucleotide primer that comprises a nucleotide sequence that is complementary to a sequence in the parent nucleic acid molecule adjacent to the DNA repair enzyme and chemically-treated target nucleotide sequence containing the one or more converted methylated or hydroxymethylated residue and (b) a second primary oligonucleotide primer that comprises a nucleotide sequence that is complementary to a portion of an extension product formed from the first primary oligonucleotide primer, wherein the first or second primary oligonucleotide primer further comprises a 5′ primer-specific portion. The treated sample, the one or more first primary oligonucleotide primers of the primer sets, the one or more enzymes capable of digesting deoxyuracil (dU)-containing nucleic acid molecules, a deoxynucleotide mix including dUTP, and a DNA polymerase are blended to form one or more polymerase extension reaction mixtures. The one or more polymerase extension reaction mixtures are subjected to conditions suitable for digesting deoxyuracil (dU)-containing nucleic acid molecules present in the polymerase extension reaction mixtures and for carrying out one or more polymerase extension reaction cycles comprising a denaturation treatment, a hybridization treatment, and an extension treatment, thereby forming primary extension products comprising the complement of the DNA repair enzyme and chemically-treated target nucleotide sequence. The one or more polymerase extension reaction mixtures comprising the primary extension products, the one or more second primary oligonucleotide primers of the primer sets, a deoxynucleotide mix including dUTP, and a DNA polymerase are blended to form one or more first polymerase chain reaction mixtures. The one or more first polymerase chain reaction mixtures are subjected to conditions suitable for carrying out one or more first polymerase chain reaction cycles comprising a denaturation treatment, a hybridization treatment, and an extension treatment, thereby forming first polymerase chain reaction products comprising the DNA repair enzyme and chemically-treated target nucleotide sequence or a complement thereof. The method further involves providing one or more oligonucleotide probe sets. Each probe set comprises (a) a first oligonucleotide probe having a 5′ primer-specific portion and a 3′ DNA repair enzyme and chemically-treated target nucleotide sequence-specific or complement sequence-specific portion, and (b) a second oligonucleotide probe having a 5′ DNA repair enzyme and chemically-treated target nucleotide sequence-specific or complement sequence-specific portion and a 3′ primer-specific portion, and wherein the first and second oligonucleotide probes of a probe set are configured to hybridize, in a base specific manner, on a complementary nucleotide sequence of a first polymerase chain reaction product. The first polymerase chain reaction products are blended with a ligase and the one or more oligonucleotide probe sets to form one or more ligation reaction mixtures. The one or more ligation reaction mixtures are subjected to one or more ligation reaction cycles whereby the first and second oligonucleotide probes of the one or more oligonucleotide probe sets are ligated together, when hybridized to their complementary sequence, to form ligated product sequences in the ligation reaction mixture wherein each ligated product sequence comprises the 5′ primer-specific portion, DNA repair enzyme and chemically-treated target nucleotide sequence-specific or complement sequence-specific portion, and the 3′ primer-specific portion. The method further comprises providing one or more secondary oligonucleotide primer sets. Each secondary oligonucleotide primer set comprises (a) a first secondary oligonucleotide primer comprising the same nucleotide sequence as the 5′ primer-specific portion of the ligated product sequence and (b) a second secondary oligonucleotide primer comprising a nucleotide sequence that is complementary to the 3′ primer-specific portion of the ligated product sequence. The ligated product sequences, the one or more secondary oligonucleotide primer sets, the one or more enzymes capable of digesting deoxyuracil (dU)-containing nucleic acid molecules, a deoxynucleotide mix including dUTP, and a DNA polymerase are blended to form one or more second polymerase chain reaction mixtures, and the one or more second polymerase chain reaction mixtures are subjected to conditions suitable for digesting deoxyuracil (dU)-containing nucleic acid molecules present in the second polymerase chain reaction mixtures and for carrying out one or more polymerase chain reaction cycles comprising a denaturation treatment, a hybridization treatment, and an extension treatment thereby forming second polymerase chain reaction products. The method further involves detecting and distinguishing the second polymerase chain reaction products in the one or more second polymerase chain reaction mixtures to identify the presence of one or more parent nucleic acid molecules containing target nucleotide sequences differing from nucleotide sequences in other parent nucleic acid molecules in the sample by one or more methylated or hydroxymethylated residues.

[0166] FIGS. 6 and 7 illustrate exPCR-LDR-qPCR carryover prevention reaction to detect low-level methylation in accordance with this aspect of the present application. The steps are similar to those steps described for FIG. 2, with two key differentiators. First, after isolating the genomic or cfDNA, it is optionally treated with a DNA repair kit (FIGS. 6 and 7, Step A). Second, the DNA is treated with ten-eleven translocation (TET1) dioxygenase and pyridine-borane for conversion of 5mC (5-methyl cytosine) and 5hmC (5-hydroxy-methyl cytosine) to DHU (dihydrouracil) (Liu et al., “Bisulfite-Free Direct Detection of 5-Methylcytosine and 5-Hydroxymethylcytosine at Base Resolution,” Nat Biotechnol. 37:424-429 (2019), which is hereby incorporated by reference in its entirety). DNA Polymerase inserts an “A” base opposite to “DHU”, thus this treatment effectively converts 5mC and 5hmC to “T” in the DNA sequence. The sample is treated with UDG or similar enzyme to remove dU containing amplification products or contaminants, as UDG does not cleave DHU bases. The regions of interest are selectively extended using locus-specific downstream primers comprising 5′ universal primer sequences and 3′ target-specific sequences. The aforementioned reference provides the option of converting both 5meC and 5hmC into 5-carboxylcytosine (5caC) using ten-eleven translocation (TET1) dioxygenase, such that both bases are converted to DHU upon treatment with pyridine borane, or to convert 5hmC to the glucosylated form using β-glucosyltransferase, such that the TET1 dioxygenase only converts 5meC to 5caC, and ultimately to DHU. Thus, if desired, 5meC and 5hmC may be distinguished in 2 separate reactions, however the preferred embodiment presented herein is to convert both 5mC and 5hmC to DHU, and after an initial cycle of PCR, to “T” in the DNA sequence. In this embodiment, another layer of selectivity can be incorporated into the method by including a 3′ cleavable blocking group (Mk 3′, e.g. C3 spacer), and an RNA base (r), in the downstream primer. Upon target-specific hybridization, RNase H (star symbol) removes the RNA base to liberate a 3′OH group which is suitable for polymerase extension (FIG. 6, step B). Optionally, the initial extension products incorporate one or more modified nucleotides, such as α-thio-dNTPs, that protect the initial extension products (but not the original cfDNA or genomic DNA) from exonuclease I digestion. The exonuclease digestion destroys wild-type DNA present in the original genomic or cfDNA sample, and thus the enriched extension products will not be diluted by subsequent extension or amplification off original wild-type DNA. The exonuclease I may be inactivated by a heat treatment (80 degrees C. for 20 minutes). As an alternative option for cleaving TET1, pyridine-borane converted DNA without cleaving the extension products, the extension reaction may be treated with Tma EndoIII, Fpg, or hNEIL1. The sample is optionally aliquoted into 12, 24, 36, 48, or 96 wells prior to the initial extension step. Subsequently, the locus-specific upstream primers are added, followed by limited (8 to 20 cycles) or full (20-40 cycles) PCR using a deoxynucleotide mix that includes dUTP (FIG. 6, step C). Upon target-specific hybridization, RNase H removes the RNA base to liberate a 3′OH group which is a few bases upstream of the TET1, pyridine-borane converted methylated (or hydroxymethylated) target base, and suitable for polymerase extension (FIG. 6, step C). An optional blocking LNA or PNA probe comprising wild-type sequence (or its complement) that partially overlaps with the upstream PCR primer will preferentially compete for binding to the wild-type sequence over the upstream primer, thus suppressing amplification of wild-type sequence DNA during each round of PCR. The downstream primers contain identical universal primer tails to prevent primer dimers. Further, such tails provide the option for including Universal primer during the PCR step. This may assist in generating more equal amounts of products in a multiplexed PCR reaction. The amplified products contain dU as shown in FIG. 6, step D, which allows for subsequent treatment with UDG or a similar enzyme for carryover prevention.

[0167] Alternatively, as shown in FIG. 7, the regions of interest are selectively extended using locus-specific upstream primers, an optional blocking LNA or PNA probe comprising wild-type sequence (or its complement). For clarity, since the TET1, pyridine-borane process leaves unmethylated cytosines unaltered, the TET1, pyridine-borane converted unmethylated sequence is the same as the original wild-type sequence. Thus, the optional blocking LNA or PNA probe would be of wild-type sequence. Treatment of methylated or hydroxymethylated DNA with TET1, pyridine-borane, especially of CpG rich CG island promoter regions will render the two strands slightly different and non-complementary to each other. The use of the TET1, pyridine-borane process has the advantage of using relatively mild conditions, such that the DNA phosphate backbone remains intact, facilitating detection of low-abundance targets, as is the case when attempting to detect circulating tumor DNA in the plasma. The use of the TET1, pyridine-borane process has the additional advantages of keeping the target sequence more balanced in base composition, and also allowing design of primers and probes of appropriate length with slightly higher Tm values. A further advantage of using the TET1, pyridine-borane process is that it alters the base that is methylated or hydroxymethylated, and thus is more similar to detecting a mutation. Since a given region of a CpG Island is usually either essentially fully methylated or alternatively essentially fully unmethylated, thoughtful design of the primers may be used to detect a methylated (or hydroxymethylated) “field effect”, i.e. a given region of for example 100 bp covering 15 CpG bases would still be scored as “positive” covering the range of from 75% to 100% of these CpG positions containing 5mC or 5hmC (including the “target” position at the 3′ end of a suitably designed LDR probe or PCR primer). Thus, even if the process does not always go to completion, e.g. converting 90% of the molecules comprising a 5mC or 5hmC at a given position, or if the region being interrogated is not “fully” methylated, the consequence would be a minor reduction in true positives, but would not lead to an increase in false-positive signal (as would be the case with bisulfite conversion). Consequently, the TET1, pyridine-borane process may still be able to distinguish the presence of low-abundance methylated target (i.e. cfDNA arising from tumor tissue) in the presence of an excess of unmethylated sequence (i.e. cfDNA arising from white-blood cells), even without the use of a blocking LNA or PNA probe (e.g. FIGS. 6-12), blocking wild-type sequence primers (FIGS. 8, 10-19), or methyl-sensitive restriction endonuclease digestion of wild-type DNA, or capture and enrichment of methylated DNA using methyl-specific or hydroxymethyl-specific DNA binding protein or antibody, or combinations of the above (FIGS. 13-19). In this embodiment, another layer of selectivity can be incorporated into the method by including a 3′ cleavable blocking group (Blk 3′, e.g. C3 spacer), and an RNA base (r), in the upstream primer. Upon target-specific hybridization, RNase H (star symbol) removes the RNA base to liberate a 3′OH group which is a few bases upstream of the TET1, pyridine-borane converted methylated (or hydroxymethylated) target base, and suitable for polymerase extension (FIG. 7, step B). An optional blocking LNA or PNA probe comprising the wild-type sequence (or its complement) that partially overlaps with the upstream PCR primer will preferentially compete for binding to the wild-type sequence over the upstream primer, thus suppressing amplification of wild-type sequence DNA during each round of PCR. Optionally, the initial extension products incorporate one or more modified nucleotides, such as α-thio-dNTPs, that protect the initial extension products (but not the original cfDNA or genomic DNA) from exonuclease I digestion. The exonuclease digestion destroys wild-type DNA present in the original genomic or cfDNA sample, and thus the enriched extension products will not be diluted by subsequent extension or amplification off original wild-type DNA. The exonuclease I may be inactivated by a heat treatment (80 degrees C. for 20 minutes). The sample is optionally aliquoted into 12, 24, 36, 48, or 96 wells prior to the initial extension step. Subsequently, the locus-specific downstream primers are added, followed by limited (8 to 20 cycles) or full (20-40 cycles) PCR using a deoxynucleotide mix that includes dUTP (FIG. 7, step C). The downstream primers contain identical universal primer tails to prevent primer dimers. Further, such tails provide the option for including Universal primer during the PCR step. This may assist in generating more equal amounts of products in a multiplexed PCR reaction.

[0168] For FIGS. 6 and 7, methylation-specific upstream and locus-specific downstream probes containing tails (Ai, Ci′) enable formation of a ligation product in the presence of TET1, pyridine-borane converted methylated (or hydroxymethylated) base-containing PCR products. Following ligation, the ligation products can be detected using pairs of matched primers Ai and Ci, and TaqMan™ probes that span the ligation junction as described supra for FIG. 2 (see FIGS. 6 and 7, steps E-H), or using other suitable means known in the art.

[0169] Alternatively, methylation-specific upstream and locus-specific downstream probes containing tails (Ai, Bi′-Ci′) enable formation of a ligation product in the presence of TET1, pyridine-borane converted methylated (or hydroxymethylated) base-containing PCR products. Following ligation, the ligation products are amplified using UniTaq-specific primers (i.e., Fl-Bi-Q-Ai, Ci) and detected as described supra for FIG. 3, or using other suitable means known in the art.

[0170] Another aspect of the present application is directed to a method for identifying, in a sample, one or more parent nucleic acid molecules containing a target nucleotide sequence differing from nucleotide sequences in other parent nucleic acid molecules in the sample by one or more methylated or hydroxymethylated residues. The method involves providing a sample containing one or more parent nucleic acid molecules potentially containing the target nucleotide sequence differing from the nucleotide sequences in other parent nucleic acid molecules by one or more methylated or hydroxymethylated residues. The nucleic acid molecules in the sample are subjected to a treatment with one or more DNA repair enzymes and chemicals under conditions suitable to convert methylated and hydroxymethylated cytosine residues to dihydrouracil residues to produce a treated sample. One or more enzymes capable of digesting deoxyuracil (dU)-containing nucleic acid molecules are provided, and one or more first primary oligonucleotide primer(s) that comprises a nucleotide sequence that is complementary to a sequence in the parent nucleic acid molecule adjacent to the DNA repair enzyme and chemically-treated target nucleotide sequence containing the one or more methylated or hydroxymethylated residue are also provided. The treated sample, the one or more first primary oligonucleotide primers, the one or more enzymes capable of digesting deoxyuracil (dU)-containing nucleic acid molecules, a deoxynucleotide mix, and a DNA polymerase are blended to form one or more polymerase extension reaction mixtures. The one or more polymerase extension reaction mixtures are subjected to conditions suitable for digesting deoxyuracil (dU)-containing nucleic acid molecules present in the polymerase extension reaction mixtures and for carrying out one or more polymerase extension reaction cycles comprising a denaturation treatment, a hybridization treatment, and an extension treatment, thereby forming primary extension products comprising the complement of the DNA repair enzyme and chemically-treated target nucleotide sequence. The method further comprises providing one or more secondary oligonucleotide primer sets. Each secondary oligonucleotide primer set comprises (a) a first secondary oligonucleotide primer having a 5′ primer-specific portion and a 3′ portion that is complementary to a portion of the polymerase extension product formed from the first primary oligonucleotide primer and (b) a second secondary oligonucleotide primer having a 5′ primer-specific portion and a 3′ portion that comprises a nucleotide sequence that is complementary to a portion of an extension product formed from the first secondary oligonucleotide primer. The one or more polymerase extension reaction mixtures comprising the primary extension products, the one or more secondary oligonucleotide primer sets, the one or more enzymes capable of digesting deoxyuracil (dU)-containing nucleic acid molecules, a deoxynucleotide mix, and a DNA polymerase are blended to form one or more first polymerase chain reaction mixtures. The one or more first polymerase chain reaction mixtures are then subjected to conditions suitable for digesting deoxyuracil (dU)-containing nucleic acid molecules present in the first polymerase chain reaction mixtures, and conditions suitable for carrying out two or more polymerase chain reaction cycles comprising a denaturation treatment, a hybridization treatment, and an extension treatment, thereby forming first polymerase chain reaction products comprising a 5′ primer-specific portion of the first secondary oligonucleotide primer, a DNA repair enzyme and chemically-treated target nucleotide sequence-specific or complement sequence-specific portion, and a complement of the 5′ primer-specific portion of the second secondary oligonucleotide primer. The method further involves providing one or more tertiary oligonucleotide primer sets. Each tertiary oligonucleotide primer set comprises (a) a first tertiary oligonucleotide primer comprising the same nucleotide sequence as the 5′ primer-specific portion of the first polymerase chain reaction products and (b) a second tertiary oligonucleotide primer comprising a nucleotide sequence that is complementary to the 3′ primer-specific portion of the first polymerase chain reactions product sequence. The first polymerase chain reaction products, the one or more tertiary oligonucleotide primer sets, the one or more enzymes capable of digesting deoxyuracil (dU) containing nucleic acid molecules, a deoxynucleotide mix including dUTP, and a DNA polymerase are blended to form one or more second polymerase chain reaction mixtures. The one or more second polymerase chain reaction mixtures are subjected to conditions suitable for digesting deoxyuracil (dU)-containing nucleic acid molecules present in the second polymerase chain reaction mixtures and for carrying out one or more polymerase chain reaction cycles comprising a denaturation treatment, a hybridization treatment, and an extension treatment thereby forming second polymerase chain reaction products. The method further involves detecting and distinguishing the second polymerase chain reaction products in the one or more second polymerase chain reaction mixtures to identify the presence of one or more parent nucleic acid molecules containing target nucleotide sequences differing from nucleotide sequences in other parent nucleic acid molecules in the sample by one or more methylated or hydroxymethylated residues.

[0171] FIGS. 8, 9, 15 and 16 illustrate various embodiments of this aspect of the present application.

[0172] FIG. 8 illustrates an exemplary exPCR-qPCR carryover prevention reaction to detect low-level methylations. Genomic or cfDNA is isolated and is optionally treated with a DNA repair kit (FIG. 8, Step A). The DNA is treated with TET1, pyridine-borane for conversion of 5mC and 5hmC to DHU, and then treated with UDG. The regions of interest are selectively extended using locus-specific downstream primers comprising 5′ universal primer sequences and 3′ target-specific sequences. In this embodiment, another layer of selectivity can be incorporated into the method by including a 3′ cleavable blocking group (Blk 3′, e.g. C3 spacer), and an RNA base (r), in the downstream primer. Upon target-specific hybridization, RNase H (star symbol) removes the RNA base to liberate a 3′OH group which is suitable for polymerase extension (FIG. 8, step B). If the locus-specific downstream primer covers one or more methylation sites, another layer of specificity may be added by using blocking primers whose sequence corresponds to the wild-type sequence. Optionally, the initial extension products incorporate one or more modified nucleotides, such as α-thio-dNTPs, that protect the initial extension products (but not the original cfDNA or genomic DNA) from exonuclease I digestion. The exonuclease digestion destroys wild-type DNA present in the original genomic or cfDNA sample, and thus the enriched extension products will not be diluted by subsequent extension or amplification off original wild-type DNA. The exonuclease I may be inactivated by a heat treatment (80 degrees C. for 20 minutes). The sample is optionally aliquoted into 12, 24, 36, 48, or 96 wells prior to the initial extension step.

[0173] Alternatively, as shown in FIG. 9, regions of interest are selectively extended using locus-specific upstream primers, an optional blocking LNA or PNA probe comprising wild type sequence (or its complement), and a deoxynucleotide mix that does not include dUTP. In this embodiment, another layer of selectivity can be incorporated into the method by including a 3′ cleavable blocking group (Blk 3′, e.g. C3 spacer), and an RNA base (r), in the upstream primer. Upon target-specific hybridization, RNase H (star symbol) removes the RNA base to liberate a 3′OH group which is a few bases upstream of the TET1, pyridine-borane converted methylated (or hydroxymethylated) target base, and suitable for polymerase extension (FIG. 9, step B). An optional blocking LNA or PNA probe comprising the wild-type sequence (or its complement) that partially overlaps with the upstream PCR primer will preferentially compete for binding to the wild-type sequence over the upstream primer, thus suppressing amplification of wild-type sequence DNA (i.e. the unmethylated DNA) during each round of PCR. Optionally, the initial extension products incorporate one or more modified nucleotides, such as α-thio-dNTPs, that protect the initial extension products (but not the original cfDNA or genomic DNA) from exonuclease I digestion. The exonuclease digestion destroys wild-type DNA present in the original genomic or cfDNA sample, and thus the enriched extension products will not be diluted by subsequent extension or amplification off original wild-type DNA. The exonuclease I may be inactivated by a heat treatment (80 degrees C. for 20 minutes). The sample is optionally aliquoted into 12, 24, 36, 48, or 96 wells prior to the initial extension step.

[0174] As shown in FIGS. 8 and 9, step C, TET1, pyridine-borane converted methylation base-specific primers (comprising 5′ primer-specific portions Ai) and TET1, pyridine-borane converted locus-specific primers (comprising 5′ primer-specific portions Ci) are added to then perform limited cycle nested PCR to amplify the TET1, pyridine-borane converted methylation-containing sequence, if present in the sample. Optionally, blocking LNA or PNA probes comprising the wild-type sequence (or its complement) enables amplification of originally methylated (or hydroxymethylated) but not originally unmethylated alleles. Primers are unblocked with RNaseH2 only when bound to correct target. Following PCR, the products can be detected using pairs of matched primers Ai and Ci, and TaqMan™ probes that span the TET1, pyridine-borane-converted methylation target regions as described supra for FIG. 2 (see FIGS. 8 and 9, steps D-F), or using other suitable means known in the art.

[0175] Alternatively, TET1, pyridine-borane converted methylation base-specific primers (comprising 5′ primer-specific portions Ai) and TET1, pyridine-borane converted locus-specific primers (comprising 5′ primer-specific portions Bi-Ci) are added to then perform limited cycle nested PCR to amplify the TET1, pyridine-borane converted methylation-containing sequence, if present in the sample. Optional blocking LNA or PNA probes comprising the wild-type sequence (or its complement) enables amplification of originally methylated but not originally un-methylated allele. Primers are unblocked with RNaseH2 only when bound to correct target. Following PCR, the products are amplified using UniTaq-specific primers (i.e., Fl-Bi-Q-Ai, Ci) and detected as described supra for FIG. 3, or using other suitable means known in the art.

[0176] Another aspect of the present application is directed to a method for identifying, in a sample, one or more parent nucleic acid molecules containing a target nucleotide sequence differing from nucleotide sequences in other parent nucleic acid molecules in the sample by one or more methylated or hydroxymethylated residues. The method involves providing a sample containing one or more nucleic acid molecules potentially containing the target nucleotide sequence differing from the nucleotide sequences in other nucleic acid molecules by one or more methylated or hydroxymethylated residues. The nucleic acid molecules in the sample are subjected to a treatment with one or more DNA repair enzymes and chemicals under conditions suitable to convert methylated and hydroxymethylated cytosine residues to dihydrouracil residues to produce a treated sample. One or more enzymes capable of digesting deoxyuracil (dU)-containing nucleic acid molecules present in the sample are provided, and one or more primary oligonucleotide primer sets are provided. Each primary oligonucleotide primer set comprises (a) a first primary oligonucleotide primer that comprises a nucleotide sequence that is complementary to a sequence in the parent nucleic acid molecule adjacent to the DNA repair enzyme and chemically-treated target nucleotide sequence containing the one or more converted methylated or hydroxymethylated residue and (b) a second primary oligonucleotide primer that comprises a nucleotide sequence that is complementary to a portion of an extension product formed from the first primary oligonucleotide primer, wherein the first or second primary oligonucleotide primer further comprises a 5′ primer-specific portion. The treated sample, the one or more first primary oligonucleotide primers of the primer sets, the one or more enzymes capable of digesting deoxyuracil (dU)-containing nucleic acid molecules in the extension reaction mixture, a deoxynucleotide mix, and a DNA polymerase are blended to form one or more polymerase extension reaction mixtures. The one or more polymerase extension reaction mixtures are subjected to conditions suitable for digesting deoxyuracil (dU)-containing nucleic acid molecules present in the polymerase extension reaction mixtures and for carrying out one or more polymerase extension reaction cycles comprising a denaturation treatment, a hybridization treatment, and an extension treatment, thereby forming primary extension products comprising the complement of the DNA repair enzyme and chemically-treated target nucleotide sequence. The one or more polymerase extension reaction mixtures comprising the primary extension products, the one or more second primary oligonucleotide primers of the one or more primary oligonucleotide primer sets, the one or more enzymes capable of digesting deoxyuracil (dU)-containing nucleic acid molecules in the reaction mixture, a deoxynucleotide mix, and a DNA polymerase are blended to form one or more first polymerase chain reaction mixtures. The one or more first polymerase chain reaction mixtures are subjected to conditions suitable for carrying out one or more first polymerase chain reaction cycles comprising a denaturation treatment, a hybridization treatment, and an extension treatment, thereby forming first polymerase chain reaction products comprising the DNA repair enzyme and chemically-treated target nucleotide sequence or a complement thereof. The method further comprises providing one or more secondary oligonucleotide primer sets. Each secondary oligonucleotide primer set comprises (a) a first secondary oligonucleotide primer having a 3′ portion that is complementary to a portion of a first polymerase chain reaction product formed from the first primary oligonucleotide primer and (b) a second secondary oligonucleotide primer having a 3′ portion that comprises a nucleotide sequence that is complementary to a portion of a first polymerase chain reaction product formed from the first secondary oligonucleotide primer. The first polymerase chain reaction products, the one or more secondary oligonucleotide primer sets, the one or more enzymes capable of digesting deoxyuracil (dU)-containing nucleic acid molecules, a deoxynucleotide mix including dUTP, and a DNA polymerase are blended to form one or more second polymerase chain reaction mixtures. The one or more second polymerase chain reaction mixtures are subjected to conditions suitable for digesting deoxyuracil (dU)-containing nucleic acid molecules present in the second polymerase chain reaction mixtures and for carrying out two or more polymerase chain reaction cycles comprising a denaturation treatment, a hybridization treatment, and an extension treatment thereby forming second polymerase chain reaction products. The method further involves detecting and distinguishing the second polymerase chain reactions products in the one or more second polymerase chain reaction mixtures to identify the presence of one or more parent nucleic acid molecules containing target nucleotide sequences differing from nucleotide sequences in other parent nucleic acid molecules in the sample by one or more methylated or hydroxymethylated residues.

[0177] FIGS. 10-12, 17, and 18 illustrate various embodiments of this aspect of the present application.

[0178] FIG. 10 illustrates another exemplary exPCR-qPCR carryover prevention reaction to detect low-level methylation. Genomic or cfDNA is isolated, and optionally treated with a DNA repair kit (FIG. 10, Step A). The DNA is treated with TET1, pyridine-borane for conversion of 5mC and 5hmC to DHU, and then treated with UDG. The regions of interest are selectively extended using locus-specific downstream primers comprising 5′ universal primer sequences and 3′ target-specific sequences. In this embodiment, another layer of selectivity can be incorporated into the method by including a 3′ cleavable blocking group (Blk 3′, e.g. C3 spacer), and an RNA base (r), in the downstream primer. Upon target-specific hybridization, RNase H (star symbol) removes the RNA base to liberate a 3′OH group which is suitable for polymerase extension (FIG. 10, step B). If the locus-specific downstream primer covers one or more methylation sites, another layer of specificity may be added by using blocking primers whose sequence corresponds to the wild-type sequence. Optionally, the initial extension products incorporate one or more modified nucleotides, such as α-thio-dNTPs, that protect the initial extension products (but not the original cfDNA or genomic DNA) from exonuclease I digestion. The exonuclease digestion destroys wild-type DNA present in the original genomic or cfDNA sample, and thus the enriched extension products will not be diluted by subsequent extension or amplification off original wild-type DNA. The exonuclease I may be inactivated by a heat treatment (80 degrees C. for 20 minutes). The sample is optionally aliquoted into 12, 24, 36, 48, or 96 wells prior to the initial extension step. Subsequently, the regions of interest are selectively amplified in a limited cycle PCR (8-20 cycles) using locus-specific upstream primers, an optional blocking LNA or PNA probe comprising wild-type sequence (or its complement), and a deoxynucleotide mix that does not include dUTP. In this embodiment, another layer of selectivity can be incorporated into the method by including a 3′ cleavable blocking group (Blk 3′, e.g. C3 spacer), and an RNA base (r), in the upstream primer. Upon target-specific hybridization, RNase H (star symbol) removes the RNA base to liberate a 3′OH group which is a few bases upstream of the TET1, pyridine-borane converted methylated target base, and suitable for polymerase extension (FIG. 10, step C). An optional blocking LNA or PNA probe comprising the TET1, pyridine-borane converted unmethylated sequence (i.e. wild-type sequence or its complement) that partially overlaps with the upstream PCR primer will preferentially compete for binding to the wild-type sequence over the upstream primer, thus suppressing amplification of wild-type sequence DNA during each round of PCR.

[0179] Following the limited cycle PCR, the PCR products are aliquoted into separate wells, micro-pores or droplets containing Taqman™ probes, TET1, pyridine-borane converted, methylation base-specific, and TET1, pyridine-borane converted locus-specific primers, to amplify the TET1, pyridine-borane converted methylation-containing sequence, if present in the sample (FIG. 10, step D). The TET1, pyridine-borane converted methylation-containing products are amplified and detected using TET1, pyridine-borane converted methylation base-specific primers, TET1, pyridine-borane converted methylation locus-specific primers, and TET1, pyridine-borane converted methylation base-specific Taqman™ probes (see FIG. 10, steps D-E), or using other suitable means known in the art.

[0180] FIGS. 11 and 12 illustrate additional exemplary exPCR-qPCR carryover prevention reaction to detect low-level methylation. Genomic or cfDNA is isolated, and optionally treated with a DNA repair kit (FIGS. 11 and 12, Step A). The DNA is treated with TET1, pyridine-borane for conversion of 5mC and 5hmC to DHU, and then treated with UDG. The regions of interest are selectively extended using locus-specific downstream primers comprising 5′ universal primer sequences and 3′ target-specific sequences. In this embodiment, another layer of selectivity can be incorporated into the method by including a 3′ cleavable blocking group (Blk 3′, e.g. C3 spacer), and an RNA base (r), in the downstream primer. Upon target-specific hybridization, RNase H (star symbol) removes the RNA base to liberate a 3′OH group which is suitable for polymerase extension (FIG. 11, step B). If the locus-specific downstream primer covers one or more methylation sites, another layer of specificity may be added by using blocking primers whose sequence corresponds to the wild-type sequence. Optionally, the initial extension products incorporate one or more modified nucleotides, such as α-thio-dNTPs, that protect the initial extension products (but not the original cfDNA or genomic DNA) from exonuclease I digestion. The exonuclease digestion destroys wild-type DNA present in the original genomic or cfDNA sample, and thus the enriched extension products will not be diluted by subsequent extension or amplification off original wild-type DNA. The exonuclease I may be inactivated by a heat treatment (80 degrees C. for 20 minutes). The sample is optionally aliquoted into 12, 24, 36, 48, or 96 wells prior to the initial extension step. Subsequently, the regions of interest are selectively amplified in a limited cycle PCR (8-20 cycles) using locus-specific upstream primers, an optional blocking LNA or PNA probe comprising wild-type sequence (or its complement), and a deoxynucleotide mix that does not include dUTP. In this embodiment, another layer of selectivity can be incorporated into the method by including a 3′ cleavable blocking group (Blk 3′, e.g. C3 spacer), and an RNA base (r), in the upstream primer. Upon target-specific hybridization, RNase H (star symbol) removes the RNA base to liberate a 3′OH group which is a few bases upstream of the TET1, pyridine-borane converted methylated (or hydroxymethylated) target base, and suitable for polymerase extension (FIG. 11, step C). An optional blocking LNA or PNA probe comprising the wild-type sequence (or its complement) that partially overlaps with the upstream PCR primer will preferentially compete for binding to the wild-type sequence over the upstream primer, thus suppressing amplification of wild-type unmethylated sequence DNA during each round of PCR.

[0181] Alternatively, as shown in FIG. 12, the regions of interest are selectively extended using locus-specific upstream primers, an optional blocking LNA or PNA probe comprising wild-type sequence (or its complement), and a deoxynucleotide mix that does not include dUTP. In this embodiment, another layer of selectivity can be incorporated into the method by including a 3′ cleavable blocking group (Blk 3′, e.g. C3 spacer), and an RNA base (r), in the upstream primer. Upon target-specific hybridization, RNase H (star symbol) removes the RNA base to liberate a 3′OH group which is a few bases upstream of the TET1, pyridine-borane converted methylated (or hydroxymethylated) target base, and suitable for polymerase extension (FIG. 12, step B). An optional blocking LNA or PNA probe comprising the wild-type sequence (or its complement) that partially overlaps with the upstream PCR primer will preferentially compete for binding to the wild-type sequence over the upstream primer, thus suppressing amplification of wild-type sequence DNA during each round of PCR. Optionally, the initial extension products incorporate one or more modified nucleotides, such as α-thio-dNTPs, that protect the initial extension products (but not the original cfDNA or genomic DNA) from exonuclease I digestion. The exonuclease digestion destroys wild-type DNA present in the original genomic or cfDNA sample, and thus the enriched extension products will not be diluted by subsequent extension or amplification off original wild-type DNA. The exonuclease I may be inactivated by a heat treatment (80 degrees C. for 20 minutes). The sample is optionally aliquoted into 12, 24, 36, 48, or 96 wells prior to the initial extension step. Subsequently, the locus-specific downstream primers comprising a 5′ primer-specific portion and a 3′ target-specific portion, are added, followed by limited cycle PCR (8 to 12 cycles, FIG. 12, step C). If the locus-specific downstream primer covers one or more methylation sites, another layer of specificity may be added by using blocking primers whose sequence corresponds to the wild-type unmethylated sequence.

[0182] For the protocol illustrated in FIGS. 11 and 12, following the limited cycle PCR, the PCR products are aliquoted into separate wells, micro-pores, or droplets containing Taqman™ probes, TET1, pyridine-borane converted methylation base-specific primers comprising 5′ primer-specific portions (Ai), TET1, pyridine-borane converted locus-specific primers comprising 5′ primer-specific portions (Ci) and matching primers Ai and Ci. These primers combine to amplify the TET1, pyridine-borane converted methylated or hydroxymethylated-containing sequence, if present in the sample (FIGS. 11 and 12, step D). Optional blocking LNA or PNA probes comprising the wild-type sequence (or its complement) enables amplification of originally methylated or hydroxymethylated but not originally un-methylated allele. Primers are unblocked with RNaseH2 only when bound to correct target. Following PCR, the products can be detected using pairs of matched primers Ai and Ci, and TaqMan™ probes that span the TET1, pyridine-borane converted methylation target regions as described supra for FIG. 8 (see FIG. 11, steps E-G), or using other suitable means known in the art.

[0183] Alternatively, following the limited cycle PCR, the PCR products are aliquoted into separate wells, micro-pores or droplets containing Taqman™ probes, TET1, pyridine-borane converted methylation base-specific primers comprising 5′ primer-specific portions (Ai), TET1, pyridine-borane converted locus-specific primers comprising 5′ primer-specific portions (Bi-Ci) and matching UniTaq primers Fl-Bi-Q-Ai and Ci. Optional blocking LNA or PNA probes comprising the wild-type sequence (or its complement) enables amplification of originally methylated but not originally un-methylated allele. Primers are unblocked with RNaseH2 only when bound to correct target. Following PCR, the products are amplified using UniTaq-specific primers (i.e., Fl-Bi-Q-Ai, Ci) and detected as described supra for FIG. 5, or using other suitable means known in the art.

[0184] FIGS. 13 and 14 illustrate additional exemplary exPCR-LDR-qPCR carryover prevention reactions to detect low-level methylation. Genomic or cfDNA is isolated and then either treated with: (i) methyl-sensitive restriction endonucleases, e.g., Bsh1236I (CGACG), to completely digest unmethylated DNA and prevent carryover, or (ii) capture and enrich for methylated DNA, (iii) followed by a DNA repair kit (FIGS. 13 and 14, step A). The DNA is treated with TET1, pyridine-borane for conversion of 5mC and 5hmC to DHU, and then treated with UDG. The regions of interest are selectively extended using locus-specific downstream primers comprising 5′ universal primer sequences and 3′ target-specific sequences. In this embodiment, another layer of selectivity can be incorporated into the method by including a 3′ cleavable blocking group (Blk 3′, e.g. C3 spacer), and an RNA base (r), in the downstream primer. Upon target-specific hybridization, RNase H (star symbol) removes the RNA base to liberate a 3′OH group which is suitable for polymerase extension (FIG. 13, step B). If the locus-specific downstream primer covers one or more methylation sites, another layer of specificity may be added by using blocking primers whose sequence corresponds to the wild-type sequence. Optionally, the initial extension products incorporate one or more modified nucleotides, such as α-thio-dNTPs, that protect the initial extension products (but not the original cfDNA or genomic DNA) from exonuclease I digestion. The exonuclease digestion destroys wild-type DNA present in the original genomic or cfDNA sample, and thus the enriched extension products will not be diluted by subsequent extension or amplification off original wild-type DNA. The exonuclease I may be inactivated by a heat treatment (80 degrees C. for 20 minutes). The sample is optionally aliquoted into 12, 24, 36, 48, or 96 wells prior to the initial extension step. Subsequently, the regions of interest are selectively amplified in a limited cycle PCR (8-20 cycles) or full cycle PCR (20-40 cycles) using locus-specific upstream primers comprising 5′ universal 10-15 base tail sequences and 3′ target-specific sequences. In this embodiment, another layer of selectivity can be incorporated into the method by including a 3′ cleavable blocking group (Blk 3′, e.g. C3 spacer), and an RNA base (r), in the upstream primer. Upon target-specific hybridization, RNase H (star symbol) removes the RNA base to liberate a 3′OH group which is a few bases upstream of the TET1, pyridine-borane converted methylated (or hydroxymethylated) target base, and suitable for polymerase extension (FIG. 13, step C). If the locus-specific upstream primer covers one or more methylation sites, another layer of specificity may be added by using blocking primers whose sequence corresponds to the wild-type unmethylated sequence. The downstream primers contain identical universal primer tails to prevent primer dimers. Further, such tails provide the option for including Universal primer during the PCR step. This may assist in generating more equal amounts of products in a multiplexed PCR reaction. The amplified products contain dU as shown in FIG. 13, step D, which allows for subsequent treatment with UDG or a similar enzyme for carryover prevention.

[0185] Alternatively, as shown in FIG. 14, the regions of interest are selectively extended using locus-specific upstream primers comprising 5′ universal 10-15 base tail sequences and 3′ target-specific sequences for TET1, pyridine-borane converted DNA. In this embodiment, another layer of selectivity can be incorporated into the method by including a 3′ cleavable blocking group (Blk 3′, e.g. C3 spacer), and an RNA base (r), in the upstream primer. Upon target-specific hybridization, RNase H (star symbol) removes the RNA base to liberate a 3′OH group which is a few bases upstream of the TET1, pyridine-borane converted methylated target base, and suitable for polymerase extension (FIG. 14, step B). If the locus-specific upstream primer covers one or more methylation sites, another layer of specificity may be added by using blocking primers whose sequence corresponds to the wild-type sequence. Optionally, the initial extension products incorporate one or more modified nucleotides, such as α-thio-dNTPs, that protect the initial extension products (but not the original cfDNA or genomic DNA) from exonuclease I digestion. The exonuclease digestion destroys wild-type DNA present in the original genomic or cfDNA sample, and thus the enriched extension products will not be diluted by subsequent extension or amplification off original wild-type DNA. The exonuclease I may be inactivated by a heat treatment (80 degrees C. for 20 minutes). The sample is optionally aliquoted into 12, 24, 36, 48, or 96 wells prior to the initial extension step. Subsequently, the locus-specific downstream primers comprising 5′ universal primer sequences and 3′ target-specific sequences are added, followed by limited (8 to 20 cycles) or full (20-40 cycles) PCR using a deoxynucleotide mix that includes dUTP (FIG. 14, step C). In this embodiment, another layer of selectivity can be incorporated into the method by including a 3′ cleavable blocking group (Blk 3′, e.g. C3 spacer), and an RNA base (r), in the downstream primer. Upon target-specific hybridization, RNase H (star symbol) removes the RNA base to liberate a 3′OH group which is suitable for polymerase extension (FIG. 14, step C). If the locus-specific downstream primer covers one or more methylation sites, another layer of specificity may be added by using blocking primers whose sequence corresponds to the wild-type unmethylated sequence. The downstream primers contain identical universal primer tails to prevent primer dimers. Further, such tails provide the option for including Universal primer during the PCR step. This may assist in generating more equal amounts of products in a multiplexed PCR reaction. The amplified products contain dU as shown in FIG. 14, step D, which allows for subsequent treatment with UDG or a similar enzyme for carryover prevention.

[0186] For FIGS. 13 and 14, methylation-specific upstream and locus-specific downstream probes containing tails (Ai, Ci′) enable formation of a ligation product in the presence of TET1, pyridine-borane converted methylated or hydroxymethylated base-containing PCR products. Following ligation, the ligation products can be detected using pairs of matched primers Ai and Ci, and TaqMan™ probes that span the ligation junction as described supra for FIG. 2 (see FIG. 13, steps E-H), or using other suitable means known in the art.

[0187] Alternatively, methylation-specific upstream and locus-specific downstream probes containing tails (Ai, Bi′-Ci′) enable formation of a ligation product in the presence of TET1, pyridine-borane converted methylated base-containing PCR products. Following ligation, the ligation products are amplified using UniTaq-specific primers (i.e., Fl-Bi-Q-Ai, Ci) and detected as described supra for FIG. 3, or using other suitable means known in the art.

[0188] FIGS. 15 and 16 illustrate additional exemplary exPCR-LDR-qPCR carryover prevention reactions to detect low-level methylation. Genomic or cfDNA is isolated, and optionally treated with: (i) methyl-sensitive restriction endonucleases, e.g., Bsh1236I (CGACG), to completely digest unmethylated DNA and prevent carryover, or (ii) capture and enrich for methylated DNA, (iii) followed by a DNA repair kit (FIGS. 15 and 16, step A). The DNA is treated with TET1, pyridine-borane for conversion of 5mC and 5hmC to DHU, and then treated with UDG. The regions of interest are selectively extended using locus-specific downstream primers comprising 5′ universal primer sequences and 3′ target-specific sequences. In this embodiment, another layer of selectivity can be incorporated into the method by including a 3′ cleavable blocking group (Blk 3′, e.g. C3 spacer), and an RNA base (r), in the downstream primer. Upon target-specific hybridization, RNase H (star symbol) removes the RNA base to liberate a 3′OH group which is suitable for polymerase extension (FIG. 15, step B). If the locus-specific downstream primer covers one or more methylation sites, another layer of specificity may be added by using blocking primers whose sequence corresponds to the wild-type sequence. Optionally, the initial extension products incorporate one or more modified nucleotides, such as α-thio-dNTPs, that protect the initial extension products (but not the original cfDNA or genomic DNA) from exonuclease I digestion. The exonuclease digestion destroys wild-type DNA present in the original genomic or cfDNA sample, and thus the enriched extension products will not be diluted by subsequent extension or amplification off original wild-type DNA. The exonuclease I may be inactivated by a heat treatment (80 degrees C. for 20 minutes). The sample is optionally aliquoted into 12, 24, 36, 48, or 96 wells prior to the initial extension step.

[0189] Alternatively, as shown in FIG. 16, the regions of interest are selectively extended using locus-specific upstream primers comprising 5′ universal 10-15 base tail sequences and 3′ target-specific sequences for TET1, pyridine-borane converted DNA. In this embodiment, another layer of selectivity can be incorporated into the method by including a 3′ cleavable blocking group (Blk 3′, e.g. C3 spacer), and an RNA base (r), in the upstream primer. Upon target-specific hybridization, RNase H (star symbol) removes the RNA base to liberate a 3′OH group which is a few bases upstream of the TET1, pyridine-borane converted methylated (or unmethylated) target base, and suitable for polymerase extension (FIG. 16, step B). Optionally, the initial extension products incorporate one or more modified nucleotides, such as α-thio-dNTPs, that protect the initial extension products (but not the original cfDNA or genomic DNA) from exonuclease I digestion. The exonuclease digestion destroys wild-type DNA present in the original genomic or cfDNA sample, and thus the enriched extension products will not be diluted by subsequent extension or amplification off original wild-type DNA. The exonuclease I may be inactivated by a heat treatment (80 degrees C. for 20 minutes). The sample is optionally aliquoted into 12, 24, 36, 48, or 96 wells prior to the initial extension step.

[0190] As shown in FIGS. 15 and 16, step C, TET1, pyridine-borane converted methylation base-specific primers (comprising 5′ primer-specific portions Ai) and TET1, pyridine-borane converted locus-specific primers (comprising 5′ primer-specific portions Ci) are added to then perform limited cycle nested PCR to amplify the TET1, pyridine-borane converted methylation-containing sequence, if present in the sample. Primers are unblocked with RNaseH2 only when bound to correct target. Following PCR, the products can be detected using pairs of matched primers Ai and Ci, and TaqMan™ probes that span the TET1, pyridine-borane converted methylation target regions as described supra for FIG. 8 (see FIGS. 15 and 16, steps D-F), or using other suitable means known in the art.

[0191] Alternatively, TET1, pyridine-borane converted methylation base-specific primers (comprising 5′ primer-specific portions Ai) and TET1, pyridine-borane converted locus-specific primers (comprising 5′ primer-specific portions Bi-Ci) are added to then perform limited cycle nested PCR to amplify the TET1, pyridine-borane converted methylation-containing sequence, if present in the sample. Primers are unblocked with RNaseH2 only when bound to correct target. Following PCR, the products are amplified using UniTaq-specific primers (i.e., Fl-Bi-Q-Ai, Ci) and detected as described supra for FIG. 5, or using other suitable means known in the art.

[0192] FIG. 17 illustrates another exemplary exPCR-qPCR carryover prevention reaction to detect low-level methylation. Genomic or cfDNA is isolated and optionally treated with: (i) methyl-sensitive restriction endonucleases, e.g., Bsh1236I (CGACG), to completely digest unmethylated DNA and prevent carryover, or (ii) capture and enrich for methylated DNA, (iii) followed by a DNA repair kit (FIG. 17, step A). The DNA is treated with TET1, pyridine-borane for conversion of 5mC and 5hmC to DHU, and then treated with UDG. The regions of interest are selectively extended using locus-specific downstream primers comprising 5′ universal 10-15 base tail sequences and 3′ target-specific sequences for TET1, pyridine-borane converted DNA. In this embodiment, another layer of selectivity can be incorporated into the method by including a 3′ cleavable blocking group (Blk 3′, e.g. C3 spacer), and an RNA base (r), in the downstream primer. Upon target-specific hybridization, RNase H (star symbol) removes the RNA base to liberate a 3′OH group, which is 15 bases or more upstream of the TET1, pyridine-borane converted methylated or hydroxymethylated target base and suitable for polymerase extension (FIG. 17, step B). If the locus-specific downstream primer covers one or more methylation sites, another layer of specificity may be added by using blocking primers whose sequence corresponds to the wild-type sequence. Optionally, the initial extension products incorporate one or more modified nucleotides, such as α-thio-dNTPs, that protect the initial extension products (but not the original cfDNA or genomic DNA) from exonuclease I digestion. The exonuclease digestion destroys wild-type DNA present in the original genomic or cfDNA sample, and thus the enriched extension products will not be diluted by subsequent extension or amplification off original wild-type DNA. The exonuclease I may be inactivated by a heat treatment (80 degrees C. for 20 minutes). The sample is optionally aliquoted into 12, 24, 36, 48, or 96 wells prior to the initial extension step. Subsequently, the regions of interest are selectively amplified in a limited cycle PCR (8-20 cycles) using locus-specific upstream primers comprising 5′ universal primer sequences and 3′ target-specific sequences, and a deoxynucleotide mix that does not include dUTP. In this embodiment, another layer of selectivity can be incorporated into the method by including a 3′ cleavable blocking group (Blk 3′, e.g. C3 spacer), and an RNA base (r), in the upstream primer. Upon target-specific hybridization, RNase H (star symbol) removes the RNA base to liberate a 3′OH group which is a few bases upstream of the TET1, pyridine-borane converted methylated target base, and suitable for polymerase extension (FIG. 17, step C). If the locus-specific upstream primer covers one or more methylation sites, another layer of specificity may be added by using blocking primers whose sequence corresponds to the wild-type unmethylated sequence.

[0193] Following the limited cycle PCR, the PCR products are aliquoted into separate wells, micro-pores or droplets containing Taqman™ probes, TET1, pyridine-borane converted, methylation base-specific, and TET1, pyridine-borane converted locus-specific primers, to amplify the TET1, pyridine-borane converted methylation-containing sequence, if present in the sample (FIG. 17, step D). The TET1, pyridine-borane converted methylation-containing products are amplified and detected as described supra for FIG. 10 (see FIG. 17, steps D-E), or using other suitable means known in the art.

[0194] FIG. 18 illustrates an additional exemplary exPCR-qPCR carryover prevention reaction to detect low-level methylation. Genomic or cfDNA is isolated, and optionally treated with: (i) methyl-sensitive restriction endonucleases, e.g., Bsh1236I (CGACG), to completely digest unmethylated DNA and prevent carryover, or (ii) capture and enrich for methylated DNA, (iii) followed by a DNA repair kit (FIG. 18, step A). The DNA is treated with TET1, pyridine-borane for conversion of 5mC and 5hmC to DHU, and then treated with UDG. The regions of interest are selectively extended using locus-specific downstream primers comprising 5′ universal 10-15 base tail sequences and 3′ target-specific sequences for TET1, pyridine-borane converted DNA. In this embodiment, another layer of selectivity can be incorporated into the method by including a 3′ cleavable blocking group (Blk 3′, e.g. C3 spacer), and an RNA base (r), in the downstream primer. Upon target-specific hybridization, RNase H (star symbol) removes the RNA base to liberate a 3′OH group, which is 15 bases or more upstream of the TET1, pyridine-borane converted methylated or hydroxymethylated target base, and suitable for polymerase extension (FIG. 18, step B). If the locus-specific downstream primer covers one or more methylation sites, another layer of specificity may be added by using blocking primers whose sequence corresponds to the wild-type unmethylated sequence. Optionally, the initial extension products incorporate one or more modified nucleotides, such as α-thio-dNTPs, that protect the initial extension products (but not the original cfDNA or genomic DNA) from exonuclease I digestion. The exonuclease digestion destroys wild-type DNA present in the original genomic or cfDNA sample, and thus the enriched extension products will not be diluted by subsequent extension or amplification off original wild-type DNA. The exonuclease I may be inactivated by a heat treatment (80 degrees C. for 20 minutes). The sample is optionally aliquoted into 12, 24, 36, 48, or 96 wells prior to the initial extension step. Subsequently, the regions of interest are selectively amplified in a limited cycle PCR (8-20 cycles) using locus-specific upstream primers comprising 5′ universal primer sequences and 3′ target-specific sequences, and a deoxynucleotide mix that does not include dUTP. In this embodiment, another layer of selectivity can be incorporated into the method by including a 3′ cleavable blocking group (Mk 3′, e.g. C3 spacer), and an RNA base (r), in the upstream primer. Upon target-specific hybridization, RNase H (star symbol) removes the RNA base to liberate a 3′OH group which is a few bases upstream of the TET1, pyridine-borane converted methylated target base, and suitable for polymerase extension (FIG. 18, step C). If the locus-specific upstream primer covers one or more methylation sites, another layer of specificity may be added by using blocking primers whose sequence corresponds to the wild-type unmethylated sequence.

[0195] For the protocol illustrated in FIG. 18, following the limited cycle PCR, the PCR products are aliquoted into separate wells, micro-pores, or droplets containing Taqman™ probes, TET1, pyridine-borane converted methylation base-specific primers comprising 5′ primer-specific portions (Ai), TET1, pyridine-borane converted locus-specific primers comprising 5′ primer-specific portions (Ci) and matching primers Ai and Ci. These primers combine to amplify the TET1, pyridine-borane converted methylation-containing sequence, if present in the sample (FIG. 18, step D). Primers are unblocked with RNaseH2 only when bound to correct target. Following PCR, the products can be detected using pairs of matched primers Ai and Ci, and TaqMan™ probes that span the TET1, pyridine-borane converted methylation target regions as described supra for FIG. 8 (see FIG. 18, steps E-G), or using other suitable means known in the art.

[0196] Alternatively, following the limited cycle PCR, the PCR products are aliquoted into separate wells, micro-pores or droplets containing Taqman™ probes, TET1, pyridine-borane converted methylation base-specific primers comprising 5′ primer-specific portions (Ai), TET1, pyridine-borane converted locus-specific primers comprising 5′ primer-specific portions (Bi-Ci) and matching UniTaq primers Fl-Bi-Q-Ai and Ci. Primers are unblocked with RNaseH2 only when bound to correct target. Following PCR, the products are amplified using UniTaq-specific primers (i.e., Fl-Bi-Q-Ai, Ci) and detected as described supra for FIG. 5, or using other suitable means known in the art.

[0197] Another aspect of the present application is directed to a method for identifying, in a sample, one or more parent nucleic acid molecules containing a target nucleotide sequence differing from nucleotide sequences in other parent nucleic acid molecules in the sample by one or more methylated or hydroxymethylated residues. The method involves providing a sample containing one or more parent nucleic acid molecules potentially containing the target nucleotide sequence differing from the nucleotide sequences in other nucleic acid molecules by one or more methylated or hydroxymethylated residues. The nucleic acid molecules in the sample are subjected to a treatment with one or more DNA repair enzymes and chemicals under conditions suitable to convert methylated and hydroxymethylated cytosine residues to dihydrouracil residues to produce a treated sample. One or more enzymes capable of digesting deoxyuracil (dU)-containing nucleic acid molecules present in the sample are provided. One or more primary oligonucleotide primer sets are also provided. Each primary oligonucleotide primer set comprises (a) a first primary oligonucleotide primer having a 5′ primer-specific portion and a 3′ portion that comprises a nucleotide sequence that is complementary to a sequence in the parent nucleic acid molecule adjacent to the DNA repair enzyme and chemically-treated target nucleotide sequence containing the one or more converted methylated or hydroxymethylated residue and (b) a second primary oligonucleotide primer having a 5′ primer-specific portion and a 3′ portion that comprises a nucleotide sequence that is complementary to a portion of an extension product formed from the first primary oligonucleotide primer. The treated sample, the one or more first primary oligonucleotide primers of the one or more primary oligonucleotide primer sets, the one or more enzymes capable of digesting deoxyuracil (dU)-containing nucleic acid molecules, a deoxynucleotide mix, and a DNA polymerase are blended to form one or more polymerase extension reaction mixtures. The one or more polymerase extension reaction mixtures are subjected to conditions suitable for digesting deoxyuracil (dU)-containing nucleic acid molecules present in the polymerase extension reaction mixtures and for carrying out one or more polymerase extension reaction cycles comprising a denaturation treatment, a hybridization treatment, and an extension treatment, thereby forming primary extension products comprising the complement of the DNA repair enzyme and chemically-treated target nucleotide sequence. The one or more polymerase extension reaction mixtures comprising the primary extension products, the one or more second primary oligonucleotide primers of the one or more primary oligonucleotide primer sets, the one or more enzymes capable of digesting deoxyuracil (dU)-containing nucleic acid molecules in the reaction mixture, a deoxynucleotide mix, and a DNA polymerase are blended to form one or more first polymerase chain reaction mixtures. The method further comprises subjecting the one or more first polymerase chain reaction mixtures to conditions suitable for carrying out one or more first polymerase chain reaction cycles comprising a denaturation treatment, a hybridization treatment, and an extension treatment, thereby forming first polymerase chain reactions products comprising the DNA repair enzyme and chemically-treated target nucleotide sequence or a complement thereof. One or more secondary oligonucleotide primer sets are provided. Each secondary oligonucleotide primer set comprises (a) a first secondary oligonucleotide primer comprising the same nucleotide sequence as the 5′ primer-specific portion of the first polymerase chain reaction products or their complements and (b) a second secondary oligonucleotide primer comprising a nucleotide sequence that is complementary to the 3′ primer-specific portion of the first polymerase chain reaction products or their complements. The first polymerase chain reaction products, the one or more secondary oligonucleotide primer sets, the one or more enzymes capable of digesting deoxyuracil (dU)-containing nucleic acid molecules, a deoxynucleotide mix including dUTP, and a DNA polymerase are blended to form one or more second polymerase chain reaction mixtures. The one or more second polymerase chain reaction mixtures are subjected to conditions suitable for digesting deoxyuracil (dU)-containing nucleic acid molecules present in the second polymerase chain reaction mixtures and for carrying out one or more polymerase chain reaction cycles comprising a denaturation treatment, a hybridization treatment, and an extension treatment thereby forming second polymerase chain reaction products. The method further involves detecting and distinguishing the second polymerase chain reaction products in the one or more second polymerase chain reaction mixtures to identify the presence of one or more parent nucleic acid molecules containing target nucleotide sequences differing from nucleotide sequences in other parent nucleic acid molecules in the sample by one or more methylated or hydroxymethylated residues.

[0198] FIG. 19 illustrates an embodiment of this aspect of the present application.

[0199] FIG. 19 illustrates an additional exemplary exPCR-qPCR carryover prevention reaction to detect low-level methylation. Genomic or cfDNA is isolated, and optionally treated with: (i) methyl-sensitive restriction endonucleases, e.g., Bsh1236I (CGACG), to completely digest unmethylated DNA and prevent carryover, or (ii) capture and enrich for methylated DNA, (iii) followed by a DNA repair kit (FIG. 19, step A). The DNA is treated with TET1, pyridine-borane for conversion of 5mC and 5hmC to DHU, and then treated with UDG. The regions of interest are selectively extended using TET1, pyridine-borane converted locus-specific downstream primers comprising 5′ primer-specific portions (Ci for FIG. 19), and a deoxynucleotide mix that does not include dUTP. In this embodiment, another layer of selectivity can be incorporated into the method by including a 3′ cleavable blocking group (Blk 3′, e.g. C3 spacer), and an RNA base (r), in the downstream primer. Upon target-specific hybridization, RNase H (star symbol) removes the RNA base to liberate a 3′OH group which is suitable for polymerase extension (FIG. 19, step B). In this embodiment, the locus-specific downstream primer covers one or more methylation sites, and another layer of specificity may be added by using blocking primers whose sequence corresponds to the wild-type unmethylated sequence. Optionally, the initial extension products incorporate one or more modified nucleotides, such as α-thio-dNTPs, that protect the initial extension products (but not the original cfDNA or genomic DNA) from exonuclease I digestion. The exonuclease digestion destroys wild-type DNA present in the original genomic or cfDNA sample, and thus the enriched extension products will not be diluted by subsequent extension or amplification off original wild-type DNA. The exonuclease I may be inactivated by a heat treatment (80 degrees C. for 20 minutes). The sample is optionally aliquoted into 12, 24, 36, 48, or 96 wells prior to the initial extension step. Subsequently, the regions of interest are selectively amplified in a limited cycle PCR (8-20 cycles) using TET1, pyridine-borane converted methylation base-specific upstream primers comprising 5′ primer-specific portions (Ai), and a deoxynucleotide mix that does not include dUTP. In this embodiment, another layer of selectivity can be incorporated into the method by including a 3′ cleavable blocking group (Blk 3′, e.g. C3 spacer), and an RNA base (r), in the upstream primer. Upon target-specific hybridization, RNase H (star symbol) removes the RNA base to liberate a 3′OH group which is a few bases upstream of the TET1, pyridine-borane converted methylated (or hydroxymethylated) target base, and suitable for polymerase extension (FIG. 19, step C). Since the methylation base-specific upstream primer covers one or more methylation sites, another layer of specificity may be added by using blocking primers whose sequence corresponds to the wild-type unmethylated sequence.

[0200] As shown in FIG. 19 step D, the limited cycle PCR products comprise of Ai tag sequence, methylation-specific sequence, and Ci′ tag sequence, and are distributed into wells, micro-pores, or droplets for Taqman™ reactions. Following PCR, the products can be detected using pairs of matched primers Ai and Ci, and TaqMan™ probes that span the TET1, pyridine-borane converted methylation target regions as described supra for FIG. 2 (see FIG. 19, steps D-F), or using other suitable means known in the art.

[0201] Alternatively, the limited cycle PCR products comprise of Ai tag sequence, methylation-specific sequence, and Bi′-Ci′ tag sequence, and are distributed into wells, micro-pores, or droplets for Taqman™ reactions. Following PCR, the products are amplified using UniTaq-specific primers (i.e., Fl-Bi-Q-Ai, Ci) and detected as described supra for FIG. 5, or using other suitable means known in the art.

[0202] In one embodiment, the methods described supra further comprise contacting the sample with DNA repair enzymes to repair damaged DNA, abasic sites, oxidized bases, or nicks in the DNA.

[0203] In certain embodiments, the sample is contacted with at least a first methylation sensitive enzyme to form a restriction enzyme reaction mixture prior to, or concurrent with, the blending step to form one or more polymerase extension reaction mixtures, wherein the first methylation sensitive enzyme cleaves nucleic acid molecules in the sample that contain one or more unmethylated residues within at least one methylation sensitive enzyme recognition sequence, and whereby the detecting involves detection of one or more parent nucleic acid molecules containing the target nucleotide sequence, wherein the parent nucleic acid molecules originally contained one or more methylated or hydroxymethylated residues.

[0204] In accordance with this and all aspects of the present invention, a “methylation sensitive enzyme” is an endonuclease that will not cleave or has reduced cleavage efficiency of its cognate recognition sequence in a nucleic acid molecule when the recognition sequence contains a methylated residue (i.e., it is sensitive to the presence of a methylated residue within its recognition sequence). A “methylation sensitive enzyme recognition sequence” is the cognate recognition sequence for a methylation sensitive enzyme. In some embodiments, the methylated residue is a 5-methyl-C, within the sequence CpG (i.e., 5-methyl-CpG). A non-limiting list of methylation sensitive restriction endonuclease enzymes that are suitable for use in the methods of the present invention include, without limitation, AciI, HinP1I, Hpy99I, HpyCH4IV, BstUI, HpaII, HhaI, or any combination thereof.

[0205] In certain embodiments, the sample is contacted with an immobilized methylated or hydroxymethylated nucleic acid binding protein or antibody to selectively bind and enrich for methylated or hydroxymethylated nucleic acid in the sample.

[0206] In another embodiment, one or more primary or secondary oligonucleotide primers comprises a portion that has no or one nucleotide sequence mismatch when hybridized in a base-specific manner to the target nucleic acid sequence or DNA repair enzyme and chemically-treated methylated or hydroxymethylated nucleic acid sequence or complement sequence thereof, but have one or more additional nucleotide sequence mismatches that interferes with polymerase extension when said primary or secondary oligonucleotide primers hybridize in a base-specific manner to a corresponding nucleotide sequence portion in wild-type nucleic acid sequence or complement sequence thereof.

[0207] In another embodiment, one or both primary oligonucleotide primers of the primary oligonucleotide primer set and/or one or both secondary oligonucleotide primers of the secondary oligonucleotide primer set have a 3′ portion comprising a cleavable nucleotide or nucleotide analogue and a blocking group, such that the 3′ end of the primer or primers is unsuitable for polymerase extension. This also involves cleaving the cleavable nucleotide or nucleotide analog of one or both oligonucleotide primers during the hybridization treatment, thereby liberating free 3′OH ends on one or both oligonucleotide primers prior to the extension treatment.

[0208] In accordance with this embodiment, one or more primary or secondary oligonucleotide primers may comprise a sequence that differs from the target nucleic acid sequence or DNA repair enzyme and chemically-treated methylated or hydroxymethylated nucleic acid sequence or complement sequence thereof, said difference is located two or three nucleotide bases from the liberated free 3′OH end.

[0209] The cleavable nucleotide may also comprise one or more RNA bases.

[0210] In another embodiment, the methods described supra further comprise providing one or more blocking oligonucleotide primers comprising one or more mismatched bases at the 3′ end or one or more nucleotide analogs and a blocking group at the 3′ end, such that the 3′ end of said blocking oligonucleotide primer is unsuitable for polymerase extension when hybridized in a base-specific manner to wild-type nucleic acid sequence or complement sequence thereof, wherein the blocking oligonucleotide primer comprises a portion having a nucleotide sequence that is the same as a nucleotide sequence portion in the wild-type nucleic acid sequence or complement sequence thereof to which the blocking oligonucleotide primer hybridizes but has one or more nucleotide sequence mismatches to a corresponding nucleotide sequence portion in the target nucleic acid sequence or DNA repair enzyme and chemically-treated methylated or hydroxymethylated nucleic acid sequence or complement sequence thereof. The one or more blocking oligonucleotide primers may be blended with the sample or products subsequently produced from the sample prior to a polymerase extension reaction, polymerase chain reaction, or ligation reaction, whereby during the hybridization step the one or more blocking oligonucleotide primers preferentially hybridize in a base-specific manner to a wild-type nucleic acid sequence or complement sequence thereof, thereby interfering with polymerase extension or ligation during reaction of a primer or probes hybridized in a base-specific manner to the wild-type sequence or complement sequence thereof.

[0211] In certain embodiments, the first secondary oligonucleotide primer has a 5′ primer-specific portion and the second secondary oligonucleotide primer has a 5′ primer-specific portion, said one or more secondary oligonucleotide primer sets further comprising a third secondary oligonucleotide primer comprising the same nucleotide sequence as the 5′ primer-specific portion of the first secondary oligonucleotide primer and (d) a fourth secondary oligonucleotide primer comprising the same nucleotide sequence as the 5′ primer-specific portion of the second secondary oligonucleotide primer.

[0212] In certain embodiments, the methods described supra further comprise providing one or more third primary oligonucleotide primers comprising the same nucleotide sequence as the 5′ primer-specific portion of the first or second primary oligonucleotide primer, and blending the one or more third primary oligonucleotide primers in the one or more first polymerase chain reaction mixtures.

[0213] In other embodiments, the methods described supra further comprise providing one or more nucleases capable of digesting nucleic acid molecules present not comprising polymerase-incorporated modified nucleotides, providing a deoxynucleotide mix that comprises one or more modified nucleotides that protect extension product but not other DNA from nuclease digestion, blending the sample, the one or more first primary oligonucleotide primers, the one or more enzymes capable of digesting deoxyuracil (dU)-containing nucleic acid molecules, the deoxynucleotide mix that comprises one or more modified nucleotides that protect extension products but not target DNA from nuclease digestion, and a DNA polymerase to form one or more polymerase extension reaction mixtures, subjecting the one or more polymerase extension reaction mixtures to conditions suitable for digesting deoxyuracil (dU)-containing nucleic acid molecules present in the polymerase extension reaction mixtures and for carrying out one or more polymerase extension reaction cycles comprising a denaturation treatment, a hybridization treatment, and an extension treatment, thereby forming primary extension products comprising modified nucleotide bases and comprising the complement of the target nucleotide sequence, blending the polymerase extension reaction mixtures comprising the primary extension products, and the one or more nucleases, and subjecting the one or more polymerase extension reaction mixtures to conditions suitable for digesting nucleic acid molecules present in the polymerase extension reaction mixtures, but not primary extension products comprising modified nucleotides.

[0214] In certain embodiments, the DNA repair enzyme is the ten-eleven translocation (TET1) dioxygenase and the chemical treatment is with pyridine-borane.

[0215] In another embodiment, the second oligonucleotide probe of the oligonucleotide probe set further comprises a unitaq detection portion, thereby forming ligated product sequences comprising the 5′ primer-specific portion, the target-specific portions, the unitaq detection portion, and the 3′ primer-specific portion. This embodiment involves providing one or more unitaq detection probes, wherein each unitaq detection probe hybridizes to a complementary unitaq detection portion and said detection probe comprises a quencher molecule and a detectable label separated from the quencher molecule, adding the one or more unitaq detection probes to the second polymerase chain reaction mixture, and hybridizing the one or more unitaq detection probes to complementary unitaq detection portions on the ligated product sequence or complement thereof during said subjecting the second polymerase chain reaction mixture to conditions suitable for one or more polymerase chain reaction cycles, wherein the quencher molecule and the detectable label are cleaved from the one or more unitaq detection probes during the extension treatment and said detecting involves the detection of the cleaved detectable label.

[0216] In certain embodiments, one primary oligonucleotide primer or one secondary oligonucleotide primer further comprises a unitaq detection portion, thereby forming extension product sequences comprising the 5′ primer-specific portion, the target-specific portions, the unitaq detection portion, and the complement of the other 5′ primer-specific portion, and complements thereof. This embodiment comprises providing one or more unitaq detection probes, wherein each unitaq detection probe hybridizes to a complementary unitaq detection portion and the detection probe comprises a quencher molecule and a detectable label separated from the quencher molecule. The one or more unitaq detection probes are added to the one or more polymerase chain reaction mixtures, and the one or more unitaq detection probes are hybridized to complementary unitaq detection portions on the ligated product sequence or complement thereof during polymerase chain reaction cycles after the first polymerase chain reaction, wherein the quencher molecule and the detectable label are cleaved from the one or more unitaq detection probes during the extension treatment and said detecting involves the detection of the cleaved detectable label.

[0217] In one embodiment, one or both oligonucleotide probes of the oligonucleotide probe set comprises a portion that has no or one nucleotide sequence mismatch when hybridized in a base-specific manner to the target nucleic acid sequence or DNA repair enzyme and chemically-treated methylated or hydroxymethylated nucleic acid sequence or complement sequence thereof, but have one or more additional nucleotide sequence mismatches that interferes with ligation when said oligonucleotide probe hybridizes in a base-specific manner to a corresponding nucleotide sequence portion in the wild-type nucleic acid sequence or complement sequence thereof.

[0218] In another embodiment, the 3′ portion of the first oligonucleotide probe of the oligonucleotide probe set comprises a cleavable nucleotide or nucleotide analogue and a blocking group, such that the 3′ end is unsuitable for polymerase extension or ligation. This method further comprises cleaving the cleavable nucleotide or nucleotide analog of the first oligonucleotide probe when the probe is hybridized to its complementary target nucleotide sequence of the primary extension product, thereby liberating a 3′OH on the first oligonucleotide probe prior to said ligating.

[0219] The one or more first oligonucleotide probe of the oligonucleotide probe set may comprise a sequence that differs from the target nucleic acid sequence or DNA repair enzyme and chemically-treated methylated or hydroxymethylated nucleic acid sequence or complement sequence thereof, said difference is located two or three nucleotide bases from the liberated free 3′OH end.

[0220] In certain embodiments, the second oligonucleotide probe has, at its 5′ end, an overlapping identical nucleotide with the 3′ end of the first oligonucleotide probe, and, upon hybridization of the first and second oligonucleotide probes of a probe set at adjacent positions on a complementary target nucleotide sequence of a primary extension product to form a junction, the overlapping identical nucleotide of the second oligonucleotide probe forms a flap at the junction with the first oligonucleotide probe. This embodiment comprises cleaving the overlapping identical nucleotide of the second oligonucleotide probe with an enzyme having 5′ nuclease activity thereby liberating a phosphate at the 5′ end of the second oligonucleotide probe prior to said ligating.

[0221] In certain embodiments, the one or more oligonucleotide probe sets further comprise a third oligonucleotide probe having a target-specific portion, wherein the second and third oligonucleotide probes of a probe set are configured to hybridize adjacent to one another on the target nucleotide sequence with a junction between them to allow ligation between the second and third oligonucleotide probes to form a ligated product sequence comprising the first, second, and third oligonucleotide probes of a probe set.

[0222] In accordance with the methods described supra, the sample may be selected from the group consisting of tissue, cells, serum, blood, plasma, amniotic fluid, sputum, urine, bodily fluids, bodily secretions, bodily excretions, cell-free circulating nucleic acids, cell-free circulating tumor nucleic acids, cell-free circulating fetal nucleic acids in pregnant woman, circulating tumor cells, tumor, tumor biopsy, and exosomes.

[0223] The one or more target nucleotide sequences can be low-abundance nucleic acid molecules comprising one or more nucleotide base mutations, insertions, deletions, translocations, splice variants, mRNA, lncRNA, ncRNA, miRNA variants, alternative transcripts, alternative start sites, alternative coding sequences, alternative non-coding sequences, alternative splicing, exon insertions, exon deletions, intron insertions, or other rearrangement at the genome level and/or methylated or hydroxymethylated nucleotide bases.

[0224] These low-abundance nucleic acid molecules have one or more nucleotide base mutations, insertions, deletions, translocations, splice variants, mRNA, lncRNA, ncRNA, miRNA variants, alternative transcripts, alternative start sites, alternative coding sequences, alternative non-coding sequences, alternative splicings, exon insertions, exon deletions, intron insertions, or other rearrangement at the genome level, and/or methylated or hydroxymethylated nucleotide bases and are identified and distinguished from a high-abundance of nucleic acid molecules in the sample having a similar nucleotide sequence as the low abundance nucleic acid molecules but without the one or more nucleotide base mutations, insertions, deletions, translocations, splice variants, mRNA, lncRNA, ncRNA, miRNA variants, alternative transcripts, alternative start sites, alternative coding sequences, alternative non-coding sequences, alternative splicing, exon insertions, exon deletions, intron insertions, or other rearrangement at the genome level, and/or methylated or hydroxymethylated nucleotide bases.

[0225] As used herein “low abundance nucleic acid molecule” refers to a target nucleic acid molecule that is present at levels as low as 1% to 0.01% of the sample. In other words, a low abundance nucleic acid molecule with one or more nucleotide base mutations, insertions, deletions, translocations, splice variants, miRNA variants, alternative transcripts, alternative start sites, alternative coding sequences, alternative non-coding sequences, alternative splicings, exon insertions, exon deletions, intron insertions, other rearrangement at the genome level, and/or methylated nucleotide bases can be distinguished from a 100 to 10,000-fold excess of nucleic acid molecules in the sample (i.e., high abundance nucleic acid molecules) having a similar nucleotide sequence as the low abundance nucleic acid molecules but without the one or more nucleotide base mutations, insertions, deletions, translocations, splice variants, miRNA variants, alternative transcripts, alternative start sites, alternative coding sequences, alternative non-coding sequences, alternative splicings, exon insertions, exon deletions, intron insertions, other rearrangement at the genome level, and/or methylated nucleotide bases.

[0226] In some embodiments of the present invention, the copy number of one or more low abundance target nucleotide sequences are quantified relative to the copy number of high abundance nucleic acid molecules in the sample having a similar nucleotide sequence as the low abundance nucleic acid molecules. In other embodiments of the present invention, the one or more target nucleotide sequences are quantified relative to other nucleotide sequences in the sample. In other embodiments of the present invention, the relative copy number of one or more target nucleotide sequences is quantified. Methods of relative and absolute (i.e., copy number) quantitation are well known in the art.

[0227] The low abundance target nucleic acid molecules to be detected can be present in any biological sample, including, without limitation, tissue, cells, serum, blood, plasma, amniotic fluid, sputum, urine, bodily fluids, bodily secretions, bodily excretions, cell-free circulating nucleic acids, cell-free circulating tumor nucleic acids, cell-free circulating fetal nucleic acids in pregnant woman, circulating tumor cells, tumor, tumor biopsy, and exosomes.

[0228] The methods of the present invention are suitable for diagnosing or prognosing a disease state and/or distinguishing a genotype or disease predisposition.

[0229] Another aspect of the present application is directed to a method of diagnosing or prognosing a disease state of cells or tissue based on identifying the presence or level of a plurality of disease-specific and/or cell/tissue-specific DNA, RNA, and/or protein markers in a biological sample of an individual. The plurality of markers is in a set comprising from 6-12 markers, 12-24 markers, 24-36 markers, 36-48 markers, 48-72 markers, 72-96 markers, or >96 markers. Each marker in a given set is selected by having any one or more of the following criteria: present, or above a cutoff level, in >50% of biological samples of the disease cells or tissue from individuals diagnosed with the disease state; absent, or below a cutoff level, in >95% of biological samples of the normal cells or tissue from individuals without the disease state; present, or above a cutoff level, in >50% of biological samples comprising cells, serum, blood, plasma, amniotic fluid, sputum, urine, bodily fluids, bodily secretions, bodily excretions, or fractions thereof, from individuals diagnosed with the disease state; absent, or below a cutoff level, in >95% of biological samples comprising cells, serum, blood, plasma, amniotic fluid, sputum, urine, bodily fluids, bodily secretions, bodily excretions, or fractions thereof, from individuals without the disease state; present with a z-value of >1.65 in the biological sample comprising cells, serum, blood, plasma, amniotic fluid, sputum, urine, bodily fluids, bodily secretions, bodily excretions, or fractions thereof, from individuals diagnosed with the disease state. At least 50% of the markers in a set each comprise one or more methylated or hydroxymethylated residues, and/or at least 50% of the markers in a set that are present, or above a cutoff level, or present with a z-value of >1.65 comprise of one or more methylated or hydroxymethylated residues, in the biological sample comprising cells, serum, blood, plasma, amniotic fluid, sputum, urine, bodily fluids, bodily secretions, bodily excretions, or fractions thereof, from at least 50% of individuals diagnosed with the disease state. The biological sample including cell-free DNA, RNA, and/or protein originating from the cells or tissue and from one or more other tissues or cells is obtained. The biological sample is selected from the group consisting of cells, serum, blood, plasma, amniotic fluid, sputum, urine, bodily fluids, bodily secretions, and bodily excretions, or fractions thereof. The sample is fractionated into one or more fractions, wherein at least one fraction comprises exosomes, tumor-associated vesicles, other protected states, or cell-free DNA, RNA, and/or protein. Nucleic acid molecules in one or more fractions are subjected to a treatment with one or more DNA repair enzymes and chemicals under conditions suitable to convert methylated and hydroxymethylated cytosine residues to dihydrouracil residues. At least one enrichment step is carried out for 50% or more disease-specific and/or cell/tissue-specific DNA, RNA, and/or protein markers during either said fractionating and/or by carrying out a nucleic acid amplification step. The method further involves performing one or more assays to detect and distinguish the plurality of disease-specific and/or cell/tissue-specific DNA, RNA, and/or protein markers, thereby identifying their presence or levels in the sample, wherein individuals are diagnosed or prognosed with the disease state if a minimum of 2 or 3 markers are present or above a cutoff level in a marker set comprising from 6-12 markers; or a minimum of 3, 4, or 5 markers are present or above a cutoff level in a marker set comprising from 12-24 markers; or a minimum of 3, 4, 5, or 6 markers are present or above a cutoff level in a marker set comprising from 24-36 markers; or a minimum of 4, 5, 6, 7, or 8 markers are present or above a cutoff level in a marker set comprising from 36-48 markers; or a minimum of 6, 7, 8, 9, 10, 11, or 12 markers are present or above a cutoff level in a marker set comprising from 48-72 markers, or a minimum of 7, 8, 9, 10, 11, 12 or 13 markers are present or above a cutoff level in a marker set comprising from 72-96 markers, or a minimum of 8, 9, 10, 11, 12, 13 or “n”/12 markers are present or above a cutoff level in a marker set comprising 96 to “n” markers, when “n”>168 markers.

[0230] Another aspect of the present application is directed to a method of diagnosing or prognosing a disease state of a solid tissue cancer including colorectal adenocarcinoma, stomach adenocarcinoma, esophageal carcinoma, breast lobular and ductal carcinoma, uterine corpus endometrial carcinoma, ovarian serous cystadenocarcinoma, cervical squamous cell carcinoma and adenocarcinoma, uterine carcinosarcoma, lung adenocarcinoma, lung squamous cell carcinoma, head & neck squamous cell carcinoma, prostate adenocarcinoma, invasive urothelial bladder cancer, liver hepatoceullular carcinoma, pancreatic ductal adenocarcinoma, or gallbladder adenocarcinoma, based on identifying the presence or level of a plurality of disease-specific and/or cell/tissue-specific DNA, RNA, and/or protein markers in a biological sample of an individual. The plurality of markers is in a set comprising from 48-72 total cancer markers, 72-96 total cancer markers or 96 total cancer markers. On average greater than one quarter such markers in a given set cover each of the aforementioned major cancers being tested. Each marker in a given set for a given solid tissue cancer is selected by having any one or more of the following criteria for that solid tissue cancer: present, or above a cutoff level, in >50% of biological samples of a given cancer tissue from individuals diagnosed with a given solid tissue cancer; absent, or below a cutoff level, in >95% of biological samples of the normal tissue from individuals without that given solid tissue cancer; present, or above a cutoff level, in >50% of biological samples comprising cells, serum, blood, plasma, amniotic fluid, sputum, urine, bodily fluids, bodily secretions, bodily excretions, or fractions thereof, from individuals diagnosed with a given solid tissue cancer; absent, or below a cutoff level, in >95% of biological samples comprising cells, serum, blood, plasma, amniotic fluid, sputum, urine, bodily fluids, bodily secretions, bodily excretions, or fractions thereof, from individuals without that given solid tissue cancer; present with a z-value of >1.65 in the biological sample comprising cells, serum, blood, plasma, amniotic fluid, sputum, urine, bodily fluids, bodily secretions, bodily excretions, or fractions thereof, from individuals diagnosed with a given solid tissue cancer. At least 50% of the markers in a set each comprise of one or more methylated residues, and/or at least 50% of the markers in a set that are present, or above a cutoff level, or present with a z-value of >1.65 comprise of one or more methylated residues, in the biological sample comprising cells, serum, blood, plasma, amniotic fluid, sputum, urine, bodily fluids, bodily secretions, bodily excretions, or fractions thereof, from at least 50% of individuals diagnosed with a given solid tissue cancer, said method comprising. The method involves obtaining a biological sample, the biological sample including cell-free DNA, RNA, and/or protein originating from the cells or tissue and from one or more other tissues or cells. The biological sample is selected from the group consisting of cells, serum, blood, plasma, amniotic fluid, sputum, urine, bodily fluids, bodily secretions, and bodily excretions, or fractions thereof. The sample is fractionated into one or more fractions, wherein at least one fraction comprises exosomes, tumor-associated vesicles, other protected states, or cell-free DNA, RNA, and/or protein. The nucleic acid molecules in one or more fractions are subjected to a treatment with one or more DNA repair enzymes and chemicals under conditions suitable to convert methylated and hydroxymethylated cytosine residues to dihydrouracil residues. At least one enrichment step is carried out for 50% or more disease-specific and/or cell/tissue-specific DNA, RNA, and/or protein markers during either said fractionating and/or by carring out a nucleic acid amplification step. The method further involves performing one or more assays to detect and distinguish the plurality of cancer-specific and/or cell/tissue-specific DNA, RNA, and/or protein markers, thereby identifying their presence or levels in the sample, wherein individuals are diagnosed or prognosed with a solid-tissue cancer if a minimum of 4 markers are present or are above a cutoff level in a marker set comprising from 48-72 total cancer markers; or a minimum of 5 markers are present or are above a cutoff level in a marker set comprising from 72-96 total cancer markers; or a minimum of 6 or “n”/18 markers are present or are above a cutoff level in a marker set comprising 96 to “n” total cancer markers, when “n”>96 total cancer markers.

[0231] Another aspect of the present application is directed to a method of diagnosing or prognosing a disease state of and identifying the most likely specific tissue(s) of origin of a solid tissue cancer in the following groups: Group 1 (colorectal adenocarcinoma, stomach adenocarcinoma, esophageal carcinoma); Group 2 (breast lobular and ductal carcinoma, uterine corpus endometrial carcinoma, ovarian serous cystadenocarcinoma, cervical squamous cell carcinoma and adenocarcinoma, uterine carcinosarcoma); Group 3 (lung adenocarcinoma, lung squamous cell carcinoma, head & neck squamous cell carcinoma); Group 4 (prostate adenocarcinoma, invasive urothelial bladder cancer); and/or Group 5 (liver hepatoceullular carcinoma, pancreatic ductal adenocarcinoma, or gallbladder adenocarcinoma) based on identifying the presence or level of a plurality of disease-specific and/or cell/tissue-specific DNA, RNA, and/or protein markers in a biological sample of an individual. The plurality of markers is in a set comprises from 36-48 group-specific cancer markers, 48-64 group-specific cancer markers or 64 group-specific cancer markers, wherein on average greater than one third such markers in a given set cover each of the aforementioned cancers being tested within that group. Each marker in a given set for a given solid tissue cancer is selected by having any one or more of the following criteria for that solid tissue cancer: present, or above a cutoff level, in >50% of biological samples of a given cancer tissue from individuals diagnosed with a given solid tissue cancer; absent, or below a cutoff level, in >95% of biological samples of the normal tissue from individuals without that given solid tissue cancer; present, or above a cutoff level, in >50% of biological samples comprising cells, serum, blood, plasma, amniotic fluid, sputum, urine, bodily fluids, bodily secretions, bodily excretions, or fractions thereof, from individuals diagnosed with a given solid tissue cancer; absent, or below a cutoff level, in >95% of biological samples comprising cells, serum, blood, plasma, amniotic fluid, sputum, urine, bodily fluids, bodily secretions, bodily excretions, or fractions thereof, from individuals without that given solid tissue cancer; present with a z-value of >1.65 in the biological sample comprising cells, serum, blood, plasma, amniotic fluid, sputum, urine, bodily fluids, bodily secretions, bodily excretions, or fractions thereof, from individuals diagnosed with a given solid tissue cancer. At least 50% of the markers in a set each comprise one or more methylated residues, and/or at least 50% of the markers in a set that are present, or above a cutoff level, or present with a z-value of >1.65 comprise one or more methylated residues, in the biological sample comprising cells, serum, blood, plasma, amniotic fluid, sputum, urine, bodily fluids, bodily secretions, bodily excretions, or fractions thereof, from at least 50% of individuals diagnosed with a given solid tissue cancer. The method involves obtaining the biological sample, the biological sample including cell-free DNA, RNA, and/or protein originating from the cells or tissue and from one or more other tissues or cells. The biological sample is selected from the group consisting of cells, serum, blood, plasma, amniotic fluid, sputum, urine, bodily fluids, bodily secretions, and bodily excretions, or fractions thereof. The sample is fractionated into one or more fractions, wherein at least one fraction comprises exosomes, tumor-associated vesicles, other protected states, or cell-free DNA, RNA, and/or protein. The nucleic acid molecules in one or more fractions are subjected to a treatment with one or more DNA repair enzymes and chemicals under conditions suitable to convert methylated and hydroxymethylated cytosine residues to dihydrouracil residues. At least one enrichment step is carried for 50% or more disease-specific and/or cell/tissue-specific DNA, RNA, and/or protein markers during either said fractionating and/or by carrying out a nucleic acid amplification step. The method further involves performing one or more assays to detect and distinguish the plurality of cancer-specific and/or cell/tissue-specific DNA, RNA, and/or protein markers, thereby identifying their presence or levels in the sample, wherein individuals are diagnosed or prognosed with a solid-tissue cancer if a minimum of 4 markers are present or are above a cutoff level in a marker set comprising from 36-48 group-specific cancer markers; or a minimum of 5 markers are present or are above a cutoff level in a marker set comprising from 48-64 group-specific cancer markers; or a minimum of 6 or “n”/12 markers are present or are above a cutoff level in a marker set comprising 64 to “n” group-specific cancer markers, when “n”>64 group-specific cancer markers.

[0232] Another aspect of the present application is directed to a method of diagnosing or prognosing a disease state of a gastrointestinal cancer including colorectal adenocarcinoma, stomach adenocarcinoma, or esophageal carcinoma, based on identifying the presence or level of a plurality of disease-specific and/or cell/tissue-specific DNA, RNA, and/or protein markers in a biological sample of an individual. The plurality of markers is in a set comprising from 6-12 markers, 12-18 markers, 18-24 markers, 24-36 markers, 36-48 markers or 48 markers. Each marker is selected by having any one or more of the following criteria for gastrointestinal cancer: present, or above a cutoff level, in >75% of biological samples of a given cancer tissue from individuals diagnosed with gastrointestinal cancer; absent, or below a cutoff level, in >95% of biological samples of the normal tissue from individuals without gastrointestinal cancer; present, or above a cutoff level, in >75% of biological samples comprising cells, serum, blood, plasma, amniotic fluid, sputum, urine, bodily fluids, bodily secretions, bodily excretions, or fractions thereof, from individuals diagnosed with gastrointestinal cancer; absent, or below a cutoff level, in >95% of biological samples comprising cells, serum, blood, plasma, amniotic fluid, sputum, urine, bodily fluids, bodily secretions, bodily excretions, or fractions thereof, from individuals without gastrointestinal cancer; present with a z-value of >1.65 in the biological sample comprising cells, serum, blood, plasma, amniotic fluid, sputum, urine, bodily fluids, bodily secretions, bodily excretions, or fractions thereof, from individuals diagnosed with gastrointestinal cancer. At least 50% of the markers in a set each comprise one or more methylated residues, and/or at least 50% of the markers in a set that are present, or above a cutoff level, or present with a z-value of >1.65 comprise one or more methylated residues, in the biological sample comprising cells, serum, blood, plasma, amniotic fluid, sputum, urine, bodily fluids, bodily secretions, bodily excretions, or fractions thereof, from at least 50% of individuals diagnosed with gastrointestinal cancer. The method involves obtaining the biological sample, the biological sample including cell-free DNA, RNA, and/or protein originating from the cells or tissue and from one or more other tissues or cells. The biological sample is selected from the group consisting of cells, serum, blood, plasma, amniotic fluid, sputum, urine, bodily fluids, bodily secretions, and bodily excretions, or fractions thereof. The sample is fractionated into one or more fractions, wherein at least one fraction comprises exosomes, tumor-associated vesicles, other protected states, or cell-free DNA, RNA, and/or protein. The nucleic acid molecules in one or more fractions are subjected to a treatment with one or more DNA repair enzymes and chemicals under conditions suitable to convert methylated and hydroxymethylated cytosine residues to dihydrouracil residues. At least one enrichment step is carried out for 50% or more disease-specific and/or cell/tissue-specific DNA, RNA, and/or protein markers during either said fractionating and/or by carrying out a nucleic acid amplification step. The method further involves performing one or more assays to detect and distinguish the plurality of cancer-specific and/or cell/tissue-specific DNA, RNA, and/or protein markers, thereby identifying their presence or levels in the sample, wherein individuals are diagnosed or prognosed with gastrointestinal cancer if a minimum of 2, 3 or 4 markers are present or are above a cutoff level in a marker set comprising from 6-12 markers; or a minimum of 2, 3, 4, or 5 markers are present or are above a cutoff level in a marker set comprising from 12-18 markers; or a minimum of 3, 4, 5, or 6 markers are present or are above a cutoff level in a marker set comprising from 18-24 markers; or a minimum of 3, 4, 5, 6, 7, or 8 markers are present or are above a cutoff level in a marker set comprising from 24-36 markers; or a minimum of 4, 5, 6, 7, 8, 9, or 10 markers are present or are above a cutoff level in a marker set comprising from 36-48 markers; or a minimum of 5, 6, 7, 8, 9, 10, 11, 12, or “n”/12 markers are present or are above a cutoff level in a marker set comprising 48 to “n” markers, when “n”>48 markers.

[0233] Another aspect of the present application is directed to a method of diagnosing or prognosing a disease state of a solid tissue cancer including colorectal adenocarcinoma, stomach adenocarcinoma, esophageal carcinoma, breast lobular and ductal carcinoma, uterine corpus endometrial carcinoma, ovarian serous cystadenocarcinoma, cervical squamous cell carcinoma and adenocarcinoma, uterine carcinosarcoma, lung adenocarcinoma, lung squamous cell carcinoma, head & neck squamous cell carcinoma, prostate adenocarcinoma, invasive urothelial bladder cancer, liver hepatoceullular carcinoma, pancreatic ductal adenocarcinoma, or gallbladder adenocarcinoma, based on identifying the presence or level of a plurality of disease-specific and/or cell/tissue-specific DNA, RNA, and/or protein markers in a biological sample of an individual. The plurality of markers is in a set comprising from 36-48 total cancer markers, 48-64 total cancer markers, or 64 total cancer markers, wherein on average greater than half of such markers in a given set cover each of the aforementioned major cancers being tested. Each marker in a given set for a given solid tissue cancer is selected by having any one or more of the following criteria for that solid tissue cancer: present, or above a cutoff level, in >75% of biological samples of a given cancer tissue from individuals diagnosed with a given solid tissue cancer; absent, or below a cutoff level, in >95% of biological samples of the normal tissue from individuals without that given solid tissue cancer; present, or above a cutoff level, in >75% of biological samples comprising cells, serum, blood, plasma, amniotic fluid, sputum, urine, bodily fluids, bodily secretions, bodily excretions, or fractions thereof, from individuals diagnosed with a given solid tissue cancer; absent, or below a cutoff level, in >95% of biological samples comprising cells, serum, blood, plasma, amniotic fluid, sputum, urine, bodily fluids, bodily secretions, bodily excretions, or fractions thereof, from individuals without that given solid tissue cancer; present with a z-value of >1.65 in the biological sample comprising cells, serum, blood, plasma, amniotic fluid, sputum, urine, bodily fluids, bodily secretions, bodily excretions, or fractions thereof, from individuals diagnosed with a given solid tissue cancer. At least 50% of the markers in a set each comprise one or more methylated residues, and/or at least 50% of the markers in a set that are present, or above a cutoff level, or present with a z-value of >1.65 comprise one or more methylated residues, in the biological sample comprising cells, serum, blood, plasma, amniotic fluid, sputum, urine, bodily fluids, bodily secretions, bodily excretions, or fractions thereof, from at least 50% of individuals diagnosed with a given solid tissue cancer. The method involves obtaining the biological sample, the biological sample including cell-free DNA, RNA, and/or protein originating from the cells or tissue and from one or more other tissues or cells. The biological sample is selected from the group consisting of cells, serum, blood, plasma, amniotic fluid, sputum, urine, bodily fluids, bodily secretions, and bodily excretions, or fractions thereof. The sample is fractionated into one or more fractions, wherein at least one fraction comprises exosomes, tumor-associated vesicles, other protected states, or cell-free DNA, RNA, and/or protein. The nucleic acid molecules in one or more fractions are subjected to a treatment with one or more DNA repair enzymes and chemicals under conditions suitable to convert methylated and hydroxymethylated cytosine residues to dihydrouracil residues. At least one enrichment step is carried out for 50% or more disease-specific and/or cell/tissue-specific DNA, RNA, and/or protein markers during either said fractionating step and/or carrying out a nucleic acid amplification step. The method further involves performing one or more assays to detect and distinguish the plurality of cancer-specific and/or cell/tissue-specific DNA, RNA, and/or protein markers, thereby identifying their presence or levels in the sample, wherein individuals are diagnosed or prognosed with a solid-tissue cancer if a minimum of 4 markers are present or are above a cutoff level in a marker set comprising from 36-48 total cancer markers; or a minimum of 5 markers are present or are above a cutoff level in a marker set comprising from 48-64 total cancer markers; or a minimum of 6 or “n”/12 markers are present or are above a cutoff level in a marker set comprising 64 to “n” total cancer markers, when “n”>64 total cancer markers.

[0234] Another aspect of the present application is directed to a method of diagnosing or prognosing a disease state of and identifying the most likely specific tissue(s) of origin of a solid tissue cancer in the following groups: Group 1 (colorectal adenocarcinoma, stomach adenocarcinoma, esophageal carcinoma); Group 2 (breast lobular and ductal carcinoma, uterine corpus endometrial carcinoma, ovarian serous cystadenocarcinoma, cervical squamous cell carcinoma and adenocarcinoma, uterine carcinosarcoma); Group 3 (lung adenocarcinoma, lung squamous cell carcinoma, head & neck squamous cell carcinoma); Group 4 (prostate adenocarcinoma, invasive urothelial bladder cancer); and/or Group 5 (liver hepatoceullular carcinoma, pancreatic ductal adenocarcinoma, or gallbladder adenocarcinoma) based on identifying the presence or level of a plurality of disease-specific and/or cell/tissue-specific DNA, RNA, and/or protein markers in a biological sample of an individual. The plurality of markers is in a set comprising from 24-36 group-specific cancer markers, 36-48 group-specific cancer markers, or 48 group-specific cancer markers. On average greater than one half of such markers in a given set cover each of the aforementioned cancers being tested within that group. Each marker in a given set for a given solid tissue cancer is selected by having any one or more of the following criteria for that solid tissue cancer: present, or above a cutoff level, in >75% of biological samples of a given cancer tissue from individuals diagnosed with a given solid tissue cancer; absent, or below a cutoff level, in >95% of biological samples of the normal tissue from individuals without that given solid tissue cancer; present, or above a cutoff level, in >75% of biological samples comprising cells, serum, blood, plasma, amniotic fluid, sputum, urine, bodily fluids, bodily secretions, bodily excretions, or fractions thereof, from individuals diagnosed with a given solid tissue cancer; absent, or below a cutoff level, in >95% of biological samples comprising cells, serum, blood, plasma, amniotic fluid, sputum, urine, bodily fluids, bodily secretions, bodily excretions, or fractions thereof, from individuals without that given solid tissue cancer; present with a z-value of >1.65 in the biological sample comprising cells, serum, blood, plasma, amniotic fluid, sputum, urine, bodily fluids, bodily secretions, bodily excretions, or fractions thereof, from individuals diagnosed with a given solid tissue cancer. At least 50% of the markers in a set each comprise one or more methylated residues, and/or at least 50% of the markers in a set that are present, or above a cutoff level, or present with a z-value of >1.65 comprise one or more methylated residues, in the biological sample comprising cells, serum, blood, plasma, amniotic fluid, sputum, urine, bodily fluids, bodily secretions, bodily excretions, or fractions thereof, from at least 50% of individuals diagnosed with a given solid tissue cancer. The method involves obtaining the biological sample, the biological sample including cell-free DNA, RNA, and/or protein originating from the cells or tissue and from one or more other tissues or cells. The biological sample is selected from the group consisting of cells, serum, blood, plasma, amniotic fluid, sputum, urine, bodily fluids, bodily secretions, and bodily excretions, or fractions thereof. The sample is fractionated into one or more fractions, wherein at least one fraction comprises exosomes, tumor-associated vesicles, other protected states, or cell-free DNA, RNA, and/or protein. The nucleic acid molecules in one or more fractions are subjected to a treatment with one or more DNA repair enzymes and chemicals under conditions suitable to convert methylated and hydroxymethylated cytosine residues to dihydrouracil residues. At least one enrichment step is carried out for 50% or more disease-specific and/or cell/tissue-specific DNA, RNA, and/or protein markers during either said fractionating step and/or by carrying out a nucleic acid amplification step. The method further involves performing one or more assays to detect and distinguish the plurality of cancer-specific and/or cell/tissue-specific DNA, RNA, and/or protein markers, thereby identifying their presence or levels in the sample, wherein individuals are diagnosed or prognosed with a solid-tissue cancer if a minimum of 4 markers are present or are above a cutoff level in a marker set comprising from 24-36 group-specific cancer markers; or a minimum of 5 markers are present or are above a cutoff level in a marker set comprising from 36-48 group-specific cancer markers; or a minimum of 6 or “n”/8 markers are present or are above a cutoff level in a marker set comprising 48 to “n” group-specific cancer markers, when “n”>48 group-specific cancer markers.

[0235] Another aspect of the present application is directed to a method of diagnosing or prognosing a disease state to guide and monitor treatment of a solid tissue cancer in one or more of the following groups: Group 1 (colorectal adenocarcinoma, stomach adenocarcinoma, esophageal carcinoma); Group 2 (breast lobular and ductal carcinoma, uterine corpus endometrial carcinoma, ovarian serous cystadenocarcinoma, cervical squamous cell carcinoma and adenocarcinoma, uterine carcinosarcoma); Group 3 (lung adenocarcinoma, lung squamous cell carcinoma, head & neck squamous cell carcinoma); Group 4 (prostate adenocarcinoma, invasive urothelial bladder cancer); and/or Group 5 (liver hepatoceullular carcinoma, pancreatic ductal adenocarcinoma, or gallbladder adenocarcinoma) based on identifying the presence or level of a plurality of disease-specific and/or cell/tissue-specific DNA, RNA, and/or protein markers in a biological sample of an individual. The plurality of markers is in a set comprising from 24-36 group-specific cancer markers, 36-48 group-specific cancer markers, or 48 group-specific cancer markers, wherein on average greater than one half of such markers in a given set cover each of the aforementioned cancers being tested within that group. Each marker in a given set for a given solid tissue cancer is selected by having any one or more of the following criteria for that solid tissue cancer: present, or above a cutoff level, in >75% of biological samples of a given cancer tissue from individuals diagnosed with a given solid tissue cancer; absent, or below a cutoff level, in >95% of biological samples of the normal tissue from individuals without that given solid tissue cancer; present, or above a cutoff level, in >75% of biological samples comprising cells, serum, blood, plasma, amniotic fluid, sputum, urine, bodily fluids, bodily secretions, bodily excretions, or fractions thereof, from individuals diagnosed with a given solid tissue cancer; absent, or below a cutoff level, in >95% of biological samples comprising cells, serum, blood, plasma, amniotic fluid, sputum, urine, bodily fluids, bodily secretions, bodily excretions, or fractions thereof, from individuals without that given solid tissue cancer; present with a z-value of >1.65 in the biological sample comprising cells, serum, blood, plasma, amniotic fluid, sputum, urine, bodily fluids, bodily secretions, bodily excretions, or fractions thereof, from individuals diagnosed with a given solid tissue cancer. At least 50% of the markers in a set each comprise of one or more methylated residues, and/or at least 50% of the markers in a set that are present, or above a cutoff level, or present with a z-value of >1.65 comprise of one or more methylated residues, in the biological sample comprising cells, serum, blood, plasma, amniotic fluid, sputum, urine, bodily fluids, bodily secretions, bodily excretions, or fractions thereof, from at least 50% of individuals diagnosed with a given solid tissue cancer. The method involves obtaining the biological sample, the biological sample including cell-free DNA, RNA, and/or protein originating from the cells or tissue and from one or more other tissues or cells. The biological sample is selected from the group consisting of cells, serum, blood, plasma, amniotic fluid, sputum, urine, bodily fluids, bodily secretions, and bodily excretions, or fractions thereof. The sample is fractionated into one or more fractions, wherein at least one fraction comprises exosomes, tumor-associated vesicles, other protected states, or cell-free DNA, RNA, and/or protein. The nucleic acid molecules in one or more fractions are subjected to a treatment with one or more DNA repair enzymes and chemicals under conditions suitable to convert methylated and hydroxymethylated cytosine residues to dihydrouracil residues. At least one enrichment step is carried out for 50% or more disease-specific and/or cell/tissue-specific DNA, RNA, and/or protein markers during either said fractionating step and/or by carrying out a nucleic acid amplification step. The method further involves performing one or more assays to detect and distinguish the plurality of cancer-specific and/or cell/tissue-specific DNA, RNA, and/or protein markers, thereby identifying their presence or levels in the sample, wherein individuals with a given tissue-specific cancer will on average have from approximately one-quarter to about one-half or more of the markers scored as present, or are above a cutoff level in the tested marker set, wherein to guide and monitor subsequent treatment, a portion or all of the identified markers scored as present or the identified markers scored as above a cutoff level in the tested marker set are deemed the “patient-specific marker set”, and retested on a subsequent biological sample from the individual during the treatment protocol, to monitor for loss of marker signal, wherein if a minimum of 3 markers remain present or remain above a cutoff level in a patient-specific marker set comprising from 12-24 markers; or if a minimum of 4 markers remain present or remain above a cutoff level in a patient-specific marker set comprising from 24-36 markers; or a minimum of 5 markers remain present or remain above a cutoff level in a patient-specific marker set comprising from 36-48 markers; or a minimum of 6 or “n”/8 markers remain present or remain above a cutoff level in a patient-specific marker set comprising 48 to “n” markers, when “n”>48 markers after the treatment protocol has been administered, then the continuing presence of said markers may guide a decision to change the cancer treatment therapy.

[0236] Another aspect of the present application is directed to a method of diagnosing or prognosing a disease state to monitor for recurrence of a solid tissue cancer in one or more of the following groups: Group 1 (colorectal adenocarcinoma, stomach adenocarcinoma, esophageal carcinoma); Group 2 (breast lobular and ductal carcinoma, uterine corpus endometrial carcinoma, ovarian serous cystadenocarcinoma, cervical squamous cell carcinoma and adenocarcinoma, uterine carcinosarcoma); Group 3 (lung adenocarcinoma, lung squamous cell carcinoma, head & neck squamous cell carcinoma); Group 4 (prostate adenocarcinoma, invasive urothelial bladder cancer); and/or Group 5 (liver hepatoceullular carcinoma, pancreatic ductal adenocarcinoma, or gallbladder adenocarcinoma) based on identifying the presence or level of a plurality of disease-specific and/or cell/tissue-specific DNA, RNA, and/or protein markers in a biological sample of an individual, wherein the plurality of markers is in a set comprising from 24-36 group-specific cancer markers, 36-48 group-specific cancer markers, or 48 group-specific cancer markers, wherein on average greater than one half of such markers in a given set cover each of the aforementioned cancers being tested within that group. Each marker in a given set for a given solid tissue cancer is selected by having any one or more of the following criteria for that solid tissue cancer: present, or above a cutoff level, in >75% of biological samples of a given cancer tissue from individuals diagnosed with a given solid tissue cancer; absent, or below a cutoff level, in >95% of biological samples of the normal tissue from individuals without that given solid tissue cancer; present, or above a cutoff level, in >75% of biological samples comprising cells, serum, blood, plasma, amniotic fluid, sputum, urine, bodily fluids, bodily secretions, bodily excretions, or fractions thereof, from individuals diagnosed with a given solid tissue cancer; absent, or below a cutoff level, in >95% of biological samples comprising cells, serum, blood, plasma, amniotic fluid, sputum, urine, bodily fluids, bodily secretions, bodily excretions, or fractions thereof, from individuals without that given solid tissue cancer; present with a z-value of >1.65 in the biological sample comprising cells, serum, blood, plasma, amniotic fluid, sputum, urine, bodily fluids, bodily secretions, bodily excretions, or fractions thereof, from individuals diagnosed with a given solid tissue cancer. At least 50% of the markers in a set each comprise of one or more methylated residues, and/or at least 50% of the markers in a set that are present, or above a cutoff level, or present with a z-value of >1.65 comprise of one or more methylated residues, in the biological sample comprising cells, serum, blood, plasma, amniotic fluid, sputum, urine, bodily fluids, bodily secretions, bodily excretions, or fractions thereof, from at least 50% of individuals diagnosed with a given solid tissue cancer. The method involves obtaining the biological sample, the biological sample including cell-free DNA, RNA, and/or protein originating from the cells or tissue and from one or more other tissues or cells, wherein the biological sample is selected from the group consisting of cells, serum, blood, plasma, amniotic fluid, sputum, urine, bodily fluids, bodily secretions, and bodily excretions, or fractions thereof. The sample is fractionated into one or more fractions, wherein at least one fraction comprises exosomes, tumor-associated vesicles, other protected states, or cell-free DNA, RNA, and/or protein. The nucleic acid molecules in one or more fractions are subjected to a treatment with one or more DNA repair enzymes and chemicals under conditions suitable to convert methylated and hydroxymethylated cytosine residues to dihydrouracil residues. At least one enrichment step is carried out for 50% or more disease-specific and/or cell/tissue-specific DNA, RNA, and/or protein markers during either said fractionating step and/or by carrying out a nucleic acid amplification step. The method further involves performing one or more assays to detect and distinguish the plurality of cancer-specific and/or cell/tissue-specific DNA, RNA, and/or protein markers, thereby identifying their presence or levels in the sample, wherein individuals with a given tissue-specific cancer will on average have from one-quarter to about one-half or more of the markers scored as present, or are above a cutoff level in the tested marker set, wherein to monitor for recurrence, a portion or all of the markers scored as being present, or the markers scored as above a cutoff level in the tested marker set are deemed the “patient-specific marker set”, and retested on subsequent biological samples from the individual after a successful treatment, to monitor for gain of marker signal, wherein if a minimum of 3 markers reappear or rise above a cutoff level in a patient-specific marker set comprising from 12-24 markers; or if a minimum of 4 markers reappear or rise above a cutoff level in a patient-specific marker set comprising from 24-36 markers; or a minimum of 5 markers reappear or rise above a cutoff level in a patient-specific marker set comprising from 36-48 markers; or a minimum of 6 or “n”/8 markers reappear or rise above a cutoff level in a patient-specific marker set comprising 48 to “n” markers, when “n”>48 markers after the treatment protocol has been administered, then the reappearance or rise or rise above a cutoff level in a patient-specific marker set may guide a decision to resume the cancer treatment therapy or change to a new cancer treatment therapy.

[0237] In one embodiment, each marker in a given set for a given solid tissue cancer is selected by having any one or more of the following criteria for that solid tissue cancer: present, or above a cutoff level, in >66% of biological samples of a given cancer tissue from individuals diagnosed with a given solid tissue cancer; absent, or below a cutoff level, in >95% of biological samples of the normal tissue from individuals without that given solid tissue cancer; present, or above a cutoff level, in >66% of biological samples comprising cells, serum, blood, plasma, amniotic fluid, sputum, urine, bodily fluids, bodily secretions, bodily excretions, or fractions thereof, from individuals diagnosed with a given solid tissue cancer; absent, or below a cutoff level, in >95% of biological samples comprising cells, serum, blood, plasma, amniotic fluid, sputum, urine, bodily fluids, bodily secretions, bodily excretions, or fractions thereof, from individuals without that given solid tissue cancer; present with a z-value of >1.65 in the biological sample comprising cells, serum, blood, plasma, amniotic fluid, sputum, urine, bodily fluids, bodily secretions, bodily excretions, or fractions thereof, from individuals diagnosed with a given solid tissue cancer.

[0238] In certain embodiments, the at least one enrichment step comprises one or more of the following steps: capturing or separating exosomes or extracellular vesicles or markers in other protected states; capturing or separating a platelet fraction; capturing or separating circulating tumor cells; capturing or separating RNA-containing complexes; capturing or separating cfDNA-nucleosome or differentially modified cfDNA-histone complexes; capturing or separating protein targets or protein target complexes; capturing or separating auto-antibodies; capturing or separating cytokines; capturing or separating methylated or hydroxymethylated cfDNA; capturing or separating marker specific DNA, cDNA, miRNA, lncRNA, ncRNA, or mRNA, or amplified complements, by hybridization to complementary capture probes in solution, on magnetic beads, or on a microarray; amplifying miRNA markers, non-coding RNA markers (lncRNA & ncRNA markers), mRNA markers, exon markers, splice-variant markers, translocation markers, or copy number variation markers in a linear or exponential manner via a polymerase extension reaction, polymerase chain reaction, DNA repair enzyme and chemically-treated-methyl-specific polymerase chain reaction, reverse-transcription reaction, DNA repair enzyme and chemically-treated-methyl-specific ligation reaction, and/or ligation reaction, using DNA polymerase, reverse transcriptase, DNA ligase, RNA ligase, DNA repair enzyme, RNase, RNaseH2, endonuclease, restriction endonuclease, exonuclease, CRISPR, DNA glycosylase or combinations thereof; selectively amplifying one or more target regions containing mutation markers or DNA repair enzyme and chemically-treated-converted DNA methylation markers, while suppressing amplification of the target regions containing wild-type sequence or complement sequence thereof, in a linear or exponential manner via a polymerase extension reaction, polymerase chain reaction, DNA repair enzyme and chemically-treated-methyl-specific polymerase chain reaction, reverse-transcription reaction, DNA repair enzyme and chemically-treated-methyl-specific ligation reaction, and/or ligation reaction, using DNA polymerase, reverse transcriptase, DNA ligase, RNA ligase, DNA repair enzyme, RNase, RNaseH2, endonuclease, restriction endonuclease, exonuclease, CRISPR, DNA glycosylase or combinations thereof; preferentially extending, ligating, or amplifying one or more primers or probes whose 3′-OH end has been liberated in an enzyme and sequence-dependent process; using one or more blocking oligonucleotide primers comprising one or more mismatched bases at the 3′ end or comprising one or more nucleotide analogs and a blocking group at the 3′ end under conditions that interfere with polymerase extension or ligation during said reaction of target-specific primer or probes hybridized in a base-specific manner to wild-type sequence or complement sequence thereof.

[0239] Another aspect of the present application relates to a two-step method of diagnosing or prognosing a disease state of cells or tissue based on identifying the presence or level of a plurality of disease-specific and/or cell/tissue-specific DNA, RNA, and/or protein markers in a biological sample of an individual. The method involves obtaining a biological sample that includes exosomes, tumor-associated vesicles, markers within other protected states, cell-free DNA, RNA, and/or protein originating from the cells or tissue and from one or more other tissues or cells. The biological sample is selected from the group consisting of cells, serum, blood, plasma, amniotic fluid, sputum, urine, bodily fluids, bodily secretions, and bodily excretions, or fractions thereof. A first step is applied to the biological samples with an overall sensitivity of >80% and an overall specificity of >90% or an overall Z-score of >1.28 to identify individuals more likely to be diagnosed or prognosed with the disease state. A second step is then applied to biological samples from those individuals identified in the first step with an overall specificity of >95% or an overall Z-score of >1.65 to diagnose or prognose individuals with the disease state. The first step and/or the second step are carried out using a method of the present application.

[0240] Fluorescent labeling. Consider an instrument that can detect 5 fluorescent signals, F1, F2, F3, F4, and F5, respectively. As an example, in the case of colon cancer, the highest frequency mutations will be found for K-ras, p53, APC and BRAF. Mutations in these four genes could be detected with a single fluorescent signal; F1, F2, F3, F4. If the scale is 1000 FU, then primer would be added using ratios of labeled and unlabeled UniTaq primers, such that amplification of LDR products on mutant target of these genes yields about 300 FU at the plateau. For the controls, the F5 would be calibrated to give a signal of 100 FU for a 1:1,000 dilution quantification control, and an additional 300 FU for ligation of mutant probe on wild-type control (should give no or low background signal).

[0241] For the other genes commonly mutated in colon cancer as shown below, (or even lower abundance mutations in the p53 gene,) the following coding system may be used: Two fluorescent signals in equimolar amount at the 5′ end of the same UniTaq, with unlabeled primer titrated in, such that both fluorescent signals plateau at 100 FU. If fluorescent signals are F1, F2, F3, F4, then that gives the ability to detect mutations in 4 genes using a single fluorescent signal, and in mutations in 6 genes using combinations of fluorescent signal:

Gene 1=F1 (300 FU) (p53, Hot Spots)

### Gene 2=F2 (300 FU) (KRAS)

### Gene 3=F3 (300 FU) (APC)

### Gene 4=F4 (300 FU) (BRAF)

### Gene 5=F1 (100 FU), F2 (100 FU) (PIK3CA)

### Gene 6=F1 (100 FU), F3 (100 FU) (FBXW7)

### Gene 7=F1 (100 FU), F4 (100 FU) (SMAD4)

[0242] Gene 8=F2 (100 FU), F3 (100 FU) (p53, additional)

### Gene 9=F2 (100 FU), F4 (100 FU) (CTNNB1)

### Gene 10=F3 (100 FU), F4 (100 FU) (NRAS)

[0243] Suppose there is a second mutation, combined with a mutation in one of the top genes. This is easy to distinguish, since the top gene will always give more signal, independent if it is overlapping with the other fluorescent signals or not. For example, if the fluorescent signal is F1 100 FU, and F2 400 FU, that would correspond to mutations in Gene 2 and Gene 5.

[0244] If there are two mutations from the less commonly mutated genes (Gene 5-Gene 10) then the results will appear either as an overlap in fluorescent signals, i.e. F1 200 FU, F2 100 FU, F4 100 FU, or all 4 fluorescent signals. If the fluorescent signals are in the ratio of 2:1:1, then it is rather straightforward to figure out the 2 mutations: in the above example, F1 200 FU, F2 100 FU, F4 100 FU, would correspond to mutations in Gene 5 and Gene 7. A similar approach for multiplexing different colors has been described by the Kartalov group (Rajagopal et al., “Supercolor Coding Methods for Large-Scale Multiplexing of Biochemical Assays,” Anal. Chem. 85(16):7629-36 (2013); U.S. Patent Application Publication No. 20140213471A1, which are hereby incorporated by reference in their entirety).

[0245] More recently, digital droplet PCR (ddPCR) has been used to provide accurate quantification of the number of mutant or methylated or hydroxymethylated molecules in a clinical sample. In general, amplification in a droplet implies at least a single molecule of the target was present in that droplet. Thus, when using a sufficient number of droplets that way exceed the number of initial targets, it is assumed that a given droplet only had a single molecule of the target. Thus, end-point PCR is often used to monitor the number of products.

[0246] Consider an instrument that can detect 5 fluorescent signals, F1, F2, F3, F4, and F5, respectively. Methylation in the promoter region of some genes often methylated in colon cancer could be used for the first four channels, for example F1=VIM, F2=SEPT9, F3=CLIP4, and F4=GSG1L. The last channel, F5 would be used as a control to assure a given droplet contained proper reagents, etc. Once again, combinations of fluorescent signal may be used to simultaneously detect methylation at 10 different promoter regions.

### Gene 1=F1 (VIM)

### Gene 2=F2 (SEPT9)

### Gene 3=F3 (CLIP4

### Gene 4=F4 (GSG1L)

### Gene 5=F1+F2 (PP1R16B)

### Gene 6=F1+F3 (KCNA3)

### Gene 7=F1+F4 (GDF6)

### Gene 8=F2+F3 (ZNF677)

### Gene 9=F2+F4 (CCNA1)

### Gene 10=F3+F4 (STK32B)

[0247] For simplicity, consider how ddPCR may be used to accurately enumerate the number of original methylated or hydroxymethylated molecules at 4 promoter regions using exPCR-ddPCR (see for example, FIGS. 4, 5, 8, 9, 11, 12, 15, 16, 17, 18 & 19). The approach also works using PCR-LDR-qPCR or exPCR-LDR-qPCR (see FIGS. 2, 3, 6, 7, 10, 13 & 14). For this illustration, consider a total of 48 methylated regions are being detected, with 4 promoter regions in a single ddPCR reaction comprising 10,000 droplets or micro-pores or micro-wells. Consider a sample with 2, 4, 5, and 1 molecule(s) of methylated promoter regions for VIM, SEPT9, CLIP4, and GSG1L, respectively. Assume the initial one-sided primer extension with blocking primer has an efficiency of 50%, so after 20 cycles, there are=20; 40; 50; and 10 extension products of methylated promoter regions for VIM, SEPT9, CLIP4, and GSG1L, respectively. Also, with blocking primer for the top strand, again, assuming a general efficiency of 50%, after 10 cycles of PCR, there are (1.5 to the 10^{th}=57×number of initial extension products)=1,140; 2,280; 2,850; and 570 copies of the PCR products for methylated VIM, SEPT9, CLIP4, and GSG1L, respectively. When such products are then diluted into 12 ddPCR reactions, on average, a given chamber will comprise of 95; 190; 237; and 48 copies of the PCR products for methylated VIM, SEPT9, CLIP4, and GSG1L, respectively. This is a total of about 570 of molecules that would be amplified with primers for the total PCR products for methylated VIM, SEPT9, CLIP4, and GSG1L. If the ddPCR comprises 10,000 droplets or micro-pores or micro-wells, on average, only 1 in 20 will actually comprise a PCR reaction; the chances of a given droplet having two amplicons that would compete with each other for resources would be about 1 in 400, or about 25 droplets would comprise 2 amplicons, which would be only 5% of the total number of droplets with only a single amplicon. Since there are 6 combinations of 2 different amplicons, on average, less than 2% of the droplets would contain two amplicons. In other words, the rare droplet comprising 2 or 3 or 4 colors would not need to be de-convoluted, they could simply be ignored as they represent approximately 4-6 droplets compared to about 48 droplets arising from a single molecule in the original sample. While it may be a bit difficult to distinguish 190 from 237 droplets, i.e. starting with 4 or 5 molecules of a given methylated target, it should be relatively straightforward to distinguish 95; 190; and 48 copies, corresponding to 2, 4, and 1 target molecules in the original sample.

[0248] For distinguishing and enumerating 10 methylation markers simultaneously in a single ddPCR reaction, consider a total of 50 methylated or hydroxymethylated regions are being detected, with 10 promoter regions in a single ddPCR reaction comprising 10,000 droplets or micro-pores or micro-wells. Consider a sample with 2, 4, 5, 1, 0, 1, 3, 2, 0, and 1 molecule(s) of methylated promoter regions for VIM, SEPT9, CLIP4, GSG1L, PP1R16B, KCNA3, GDF6, ZNF677, CCNA1, and STK32B, respectively. Assume the initial one-sided primer extension with blocking primer has an efficiency of 50%, so after 20 cycles, there are=20; 40; 50; 10; 0; 10; 30; 20; 0; and 10 extension products of methylated promoter regions for VIM, SEPT9, CLIP4, GSG1L, PP1R16B, KCNA3, GDF6, ZNF677, CCNA1, and STK32B, respectively.

[0249] Also, with blocking primer for the top strand, again, assuming a general efficiency of 50%, after 6 cycles of PCR, there are (1.5 to the 6^{th}=11×number of initial extension products)=220; 440; 550; 110; 0; 110; 330; 220; 0; and 110 copies of the PCR products for methylated VIM, SEPT9, CLIP4, GSG1L, PP1R16B, KCNA3, GDF6, ZNF677, CCNA1, and STK32B, respectively. When such products are then diluted into 5 ddPCR reactions, on average, a given chamber will comprise of 44; 88; 110; 22; 0; 22; 66; 44; 0; and 22 copies of the PCR products for methylated VIM, SEPT9, CLIP4, GSG1L, PP1R16B, KCNA3, GDF6, ZNF677, CCNA1, and STK32B, respectively. This is a total of about 418 of molecules that would be amplified with primers for the total PCR products for methylated VIM, SEPT9, CLIP4, GSG1L, PP1R16B, KCNA3, GDF6, ZNF677, CCNA1, and STK32B. If the ddPCR comprises 10,000 droplets or micro-pores or micro-wells, on average, only 1 in 25 will actually comprise a PCR reaction; the chances of a given droplet having two amplicons that would compete with each other for resources would be about 1 in 625, or about 16 droplets would comprise 2 amplicons, which would be only 4% of the total number of droplets with only a single amplicon. Since there are 45 combinations of 2 different amplicons, on average, less than 0.1% of the droplets would contain a given two amplicons. In other words, the rare droplet comprising 2 or 3 or 4 colors would not need to be de-convoluted, they could simply be ignored as they represent one or two droplets compared to about 22 droplets arising from a single molecule in the original sample. While it may be a bit difficult to distinguish 88 from 110 droplets, i.e. starting with 4 or 5 molecules of a given methylated or hydroxymethylated target, it should be relatively straightforward to distinguish 44, 88, and 22 copies, corresponding to 2, 4, and 1 target molecules in the original sample.

[0250] The above approach would also work for accurately enumerating mRNA, miRNA, ncRNA or lncRNA target molecules. The sample is used directly for subsequent ddPCR enumeration. For distinguishing and enumerating 10 mRNA, ncRNA, or lncRNA markers simultaneously in a single ddPCR reaction, consider a total of 50 mRNA, ncRNA or lncRNA regions are being detected in a single ddPCR reaction comprising 10,000 droplets or micro-pores or micro-wells. Once again, combinations of fluorescent signal may be used to simultaneously detect 10 mRNA or ncRNA markers.

Gene 1=F1 (mRNA1)
Gene 2=F2 (mRNA2)
Gene 3=F3 (mRNA3)
Gene 4=F4 (mRNA4)
Gene 5=F1+F2 (ncRNA5)
Gene 6=F1+F3 (ncRNA6)
Gene 7=F1+F4 (ncRNA7)
Gene 8=F2+F3 (ncRNA8)
Gene 9=F2+F4 (ncRNA9)
Gene 10=F3+F4 (ncRNA10)

[0251] Consider a sample with 2, 4, 15, 1, 0, 10, 3, 20, 0, and 1 molecule(s) of mRNA1-4 and ncRNA5-10, respectively. Six cycles of RT-PCR will generate 64 cDNA copies of each transcript generating=128; 256; 960; 64; 0; 640; 192; 1280; 0; and 64 copies of mRNA1-4 and ncRNA5-10, respectively. When such products are then diluted into 5 ddPCR reactions, on average, a given chamber will comprise of 25; 51; 192; 13; 0; 128; 28; 256; 0; and 13 copies of the PCR products for mRNA1-4 and ncRNA5-10, respectively. This is a total of about 706 of molecules that would be amplified with primers for the total PCR products for methylated mRNA1-4 and ncRNA5-10. If the ddPCR comprises 10,000 droplets or micro-pores or micro-wells, on average, only 1 in 14 will actually comprise a PCR reaction. The two most common RNA's in this example; mRNA 3 and ncRNA5 would be present on average of 1 in 52 and 1 in 39, thus the chances of a given droplet having these two amplicons that would compete with each other for resources would be about 1 in 2028, or about 5 droplets would comprise 2 amplicons, which is still less than for a single molecule after amplification—which will generate 13 copies. In other words, the rare droplet comprising 2 or 3 or 4 colors would not need to be de-convoluted, they could simply be ignored as they represent from 1 to 5 droplets compared to at least 13 droplets arising from a single molecule in the original sample. If some RNA molecules are present in higher amounts, one can still de-convolute multiple signals arising from 2 amplicons in a given droplet, using the same approach of different color probes at different levels of FU (i.e. 300 FU for products with a single color; 100 FU each for products using 2 colors) as articulated earlier.

[0252] Another aspect of the present application relates to the ability to distinguish cancer at the earliest stages when analyzing markers within a blood sample. The average body contains about 6 liters (6,000 ml) of blood. A 10 ml sample will then comprise 1/600th of the sample. While some cancers (i.e. lung cancer, melanoma) have a high mutational load, other cancers (i.e. breast, ovarian) have few mutations, and even fewer at the earliest stages. In contrast, methylation changes in promoter regions (i.e. methylation markers) appear to be early events. For the purposes of the calculations below, assume that if a marker is present in the sample, it can be detected down to the single molecule level, independent of the technology that is being used to identify the marker.

[0253] On a practical level, different cancers have different frequencies for different mutational markers. For example, the mutation rate for gene K-ras is ˜30% and >90% for colorectal cancer and pancreatic cancer, respectively. While p53 is found mutated in about 50% of all cancers, more often than not, such a mutation is manifested in late-stage tumors. As a benchmark, a given cancer during its earliest stage, generates at least one detectable mutation. Suppose that at any given time, there are 200 mutated molecules circulating in the plasma of the patient. Given the total volume, if there is a 10 ml sample, taken, then there is about a ⅓^{rd} chance that the sample will contain at least 1 mutated molecule. A more accurate prediction would be based on the Poisson distribution. If there are 200 objects (i.e. mutated molecules) distributed into 600 bins (i.e. 600 aliquots of 10 ml representing the total blood volume of a patient), Poisson calculation would indicate that: 72% of wells will have 0 objects, 23.7% will have 1 object, 3.9% will have 2 objects, 0.4% will have 3 objects, etc. In other words, 28.1% of the aliquots would have at least one mutated molecule. If the assay is capable of detecting every single mutated molecule, then its sensitivity would be 28.1%. Likewise, if there were 300 objects (i.e. mutated molecules) distributed into 600 bins (i.e. 600 aliquots of 10 ml), then: 61% of wells will have 0 objects, 30.3% will have 1 object, 7.6% will have 2 objects, 1.3% will have 3 objects, etc. In other words, 39.4% of the aliquots would have at least one mutated molecule. If the assay is capable of detecting every single mutated molecule, its sensitivity is at 39.4%. Likewise, if there were 400 objects (i.e. mutated molecules) distributed into 600 bins (i.e. 600 aliquots of 10 ml), then: 51% of wells will have 0 objects, 34.3% will have 1 object, 11.5% will have 2 objects, 2.5% will have 3 objects, etc. In other words, 49% of the aliquots would have at least one mutated molecule. If the assay detects every single mutated molecule, its sensitivity would be 49%. Likewise, if there were 600 objects (i.e. mutated molecules) distributed into 600 bins (i.e. 600 aliquots of 10 ml), then the Poisson calculation would be: 36.8% of wells will have 0 objects, 36.8% will have 1 object, 18.3% will have 2 objects, 6.1% will have 3 objects, etc. In other words, 63.2% of the aliquots would have at least one mutated molecule. If the assay detects every single mutated molecule, then its sensitivity will be 63.2%. Nevertheless, on a practical level, even with a detectable marker load as high as 600 molecules, the assay would still miss 36.8% of early cancers for that type of tumor. Recent literature results have argued what constitutes “early cancer”, with some groups claiming stage I & II cancers are early cancer, while others claiming that stages I, II, and III cancers are early cancer, both the definition and type varies, but general when scoring form mutations the results have reported sensitivities ranging from around 20% to around 70%—which translates into missing 30% to 80% of early cancers (Klein et al., “Development of a Comprehensive Cell-free DNA (cfDNA) Assay for Early Detection of Multiple Tumor Types: The Circulating Cell-free Genome Atlas (CCGA) Study,” Journal of Clinical Oncology 36(15):12021-12021 (2018); Liu et al., “Breast Cancer Cell-free DNA (cfDNA) Profiles Reflect Underlying Tumor Biology: The Circulating Cell-free Genome Atlas (CCGA) Study,” Journal of Clinical Oncology 36(15):536-536 (2018), which are hereby incorporated by reference in their entirety).

[0254] The above calculations are performed based on the assumption that detecting even a single mutation is sufficient to call a patient positive. Initial work identifying mutations in the blood from patients with metastatic disease revealed an average of 5 mutations not only in the patients, but also in age-matched controls (Razavi, et al., “Cell-free DNA (cfDNA) Mutations From Clonal Hematopoiesis: Implications for Interpretation of Liquid Biopsy Tests,” Journal of Clinical Oncology 35(15):11526-11526 (2017), which is hereby incorporated by reference in its entirety). This phenomenon, known as clonal hematopoiesis, results from accumulation of mutations in white-blood cells, that then undergo clonal expansion. Once the presence of such mutations are accounted for (by sequencing an aliquot of WBC DNA from the same individual), the accuracy or specificity of these tests has been set at 98%. For some cancers like ovarian cancer, which exhibit low mutation load, an estimated 60% of the disease at its early stage would be missed. To put these number in perspective, there were 20,240 new cases of ovarian cancer in the US in 2018. Thus, about 55 million women (over the age of 50) should be tested for the disease. Such test would identify 8,096 women with ovarian cancer. However, there would be about 1.1 million false-positives. The positive predictive value of such a test would be around 0.74%. In other words, only one in 136 women who tested positive would actually have ovarian cancer, the rest would be false-positives.

[0255] For a multi-marker test of the present application, two or more markers need to be deemed positive in order the overall screening result to be deemed positive. By increasing the total number of individual markers used, as well as the number of markers required to call the overall screening test positive, both sensitivity and specificity for detecting early cancer may be improved. The overall early cancer detection sensitivity is a function of the average number of each marker in the blood, the average number of markers positive, the minimum number of markers required to call the sample positive, and the total number of markers scored. For example, if the test uses 12 methylation markers, that on average are methylated (or hydroxymethylated) in >50% of tumors for that cancer type, then on average, about 6 markers will be methylated for a given sample. If on average there are 600 methylated molecules in the blood for each marker, then on average a total of 600×600=3,600 objects (i.e. methylated molecules) are distributed into 600 bins (i.e. 600 aliquots of 10 ml). As an approximate calculation based on the Poisson calculation, the distribution would be: 0.2% of wells will have 0 objects, 1.5% will have 1 object, 4.5% will have 2 objects, 8.9% will have 3 objects, 13.3% will have 4 objects, 16.0% will have 5 objects, 16.0% will have 6 objects, 13.8% will have 7 objects, 10.3% will have 8 objects etc. Suppose that at least two markers need to be called positive. In this case, 1.7% (=0.2%+1.5%) of the aliquots with either 0 or 1 object (i.e. methylation markers) would be called negative. Thus, if a minimum of two markers are required to call the sample positive, then the sensitivity of the assay would be 100%−1.7%=98.3% sensitivity. Suppose that at least three markers need to be called positive. In this case, aliquots with either 0, 1 or 2 objects (i.e. methylation markers) would be called negative=0.2%+1.5%+4.5%=6.2%. Thus, if a minimum of two markers are required to call the sample positive, then the sensitivity of the assay would be 100%−6.2%=93.8% sensitivity. It is understood that a small fraction of aliquots with 3 markers positive will contain 2 molecules of one marker, and one molecule of a second marker, and thus not contain the minimum of three different markers positive, nevertheless, this is a small deviation from the approximate calculation above.

[0256] The overall early cancer detection specificity is a function of the average number of markers positive, the false-positive rate for each individual marker, the minimum number of markers required to call the sample positive, and the total number of markers scored. To estimate the overall false-positive rate, a formula is used based on the probability of binning different color socks into a number of drawers. Consider the percentage of false positives for each marker=“% FP”; the total number of markers “m”, and the minimum number of markers required to call the sample positive “n”. Then the formula for calculating overall false positive would be: (% FP)ⁿ×[m!/(m−n)!n!]. Suppose that percentage of false positives for each marker=“% FP” is at 4%; the total number of markers “m” is 12, and the minimum number of markers required to call the sample positive “n” is 3. Then the above formula for overall false-positives would be (4%)³×[12!/9!3!]=(4%)³×[12×11×10/6]=1.4%. Thus, the overall specificity would be [100%−1.4%]=98.6%. The actual individual false-positive rate may differ for different markers. Further, it may depend on the source of the false-positive signal. If for example, age-related methylation is due to clonal hematopoiesis, i.e. results from accumulation of methylations in white-blood cells, that then undergo clonal expansion. This type of false-positive may be mitigated by also scoring for methylation changes in white blood cells from the same patient. On the other hand, if the source of the false-positive signal is due to release of DNA into the plasma due to tissue inflammation, or for example breakdown of muscle tissue from weight-lifting, then mitigating that signal may require sampling the blood at a different time when the body is rested, or a month later when inflammation has subsided.

[0257] FIGS. 20, 21, and 22 illustrate results for calculated overall Sensitivity and Specificity for 24, 36, and 48 markers, respectively. These graphs are based on the assumption that the average individual marker sensitivity is 50%, and the average individual marker false-positive rate is from 2% to 5%. The sensitivity curves provide overall sensitivity as a function of the average number of molecules in the blood for each marker, with separate curves for each minimum number of markers needed to call a sample as positive. The specificity curves provide overall specificity as a function of individual marker false-positive rates, again with separate curves for each minimum number of markers needed to call a sample as positive. The calculated numbers for overall Sensitivity and Specificity for 12, 24, 36, 48, 72 and 96 markers, respectively are provided in the tables below.

TABLE 1
12 Markers Sensitivity;
Avg. Indiv. Mkr,: 50% Sensitivity

| Average | | | |
|---|---|---|---|
| Number of | | 12 markers, | 12 markers, |
| Molecules in | Mutation, 1 | Minimum 2 | Minimum 3 |
| Blood | Positive | Positive | Positive |
| 150 | 22.1% | 44.2% | 19.1% |
| 200 | 28.1% | 59.4% | 32.3% |
| 240 | 33.0% | 69.2% | 43.0% |
| 300 | 39.4% | 80.1% | 57.7% |
| 400 | 48.8% | 90.8% | 76.2% |
| 480 | 55.1% | 95.2% | 85.7% |
| 600 | 63.2% | 98.3% | 93.8% |

TABLE 2
12 Marker Specificity

| Individual | Minimum 2 | Minimum 3 |
|---|---|---|
| marker FP | Markers | Markers |
| rate | Positive | Positive |
| 2% | 97.4% | 99.9% |
| 3% | 94.1% | 99.5% |
| 4% | 89.4% | 98.6% |
| 5% | | 97.2% |

TABLE 3
24 Markers Sensitivity;
Avg. Indiv. Mkr,: 50% Sensitivity

| Average | | | | |
|---|---|---|---|---|
| Number of | | 24 markers, | 24 markers, | 24 markers, |
| Molecules in | Mutation, 1 | Minimum 3 | Minimum 4 | Minimum 5 |
| Blood | Positive | Positive | Positive | Positive |
| 150 | 22.1% | 57.7% | 35.3% | 18.5% |
| 200 | 28.1% | 76.2% | 56.7% | 37.1% |
| 240 | 33.0% | 85.7% | 70.6% | 52.4% |
| 300 | 39.4% | 93.8% | 84.9% | 71.5% |
| 400 | 48.8% | 98.6% | 95.8% | 90.0% |
| 480 | 55.1% | 99.6% | 98.6% | 96.2% |
| 600 | 63.2% | 99.9% | 99.8% | 99.2% |

TABLE 4
24 Marker Specificity

| Individual | Minimum 3 | Minimum 4 | Minimum 5 |
|---|---|---|---|
| marker FP | Markers | Markers | Markers |
| rate | Positive | Positive | Positive |
| 2% | 98.4% | 99.8% | 99.9% |
| 3% | 94.6% | 99.1% | 99.9% |
| 4% | 87.1% | 97.3% | 99.6% |
| 5% | | 93.4% | 98.7% |

TABLE 5
36 Marker Sensitivity;
Avg. Indiv. Mkr,: 50% Sensitivity

| Average | | 36 | 36 | 36 | 36 |
|---|---|---|---|---|---|
| Number of | Mutation, | markers, | markers, | markers, | markers, |
| Molecules | 1 | Minimum | Minimum | Minimum | Minimum |
| in Blood | Positive | 3 Positive | 4 Positive | 5 Positive | 6 Positive |
| 150 | 22.1% | 82.6% | 65.8% | 46.8% | 29.7% |
| 200 | 28.1% | 93.8% | 84.9% | 71.5% | 55.4% |
| 240 | 33.0% | 97.5% | 92.8% | 84.4% | 72.4% |
| 300 | 39.4% | 99.4% | 97.9% | 94.5% | 88.4% |
| 400 | 48.8% | 99.9% | 99.8% | 99.2% | 98.0% |
| 480 | 55.1% | 100.0% | 100.0% | 99.9% | 99.6% |
| 600 | 63.2% | 100.0% | 100.0% | 100.0% | 100.0% |

TABLE 6
36 Marker Specificity

| Individual | Minimum 3 | Minimum 4 | Minimum 5 | Minimum 6 |
|---|---|---|---|---|
| marker FP | Markers | Markers | Markers | Markers |
| rate | Positive | Positive | Positive | Positive |
| 2% | 94.3% | 99.1% | 99.9% | 100.0% |
| 3% | 80.7% | 95.2% | 99.1% | 99.9% |
| 4% | | 84.9% | 96.1% | 99.2% |
| 5% | | | 88.2% | 97.0% |

TABLE 7
48 Marker Sensitivity; Avg. Indiv. Mkr,: 50% Sensitivity

| Average | | | | | | |
|---|---|---|---|---|---|---|
| Number of | | 48 markers, | 48 markers, | 48 markers, | 48 markers, | 48 markers, |
| Molecules | Mutation, | Minimum 4 | Minimum 5 | Minimum 6 | Minimum 7 | Minimum 8 |
| in Blood | 1 Positive | Positive | Positive | Positive | Positive | Positive |
| 150 | 22.1% | 84.9% | 71.6% | 55.6% | 39.6% | 25.8% |
| 200 | 28.1% | 95.8% | 90.1% | 80.9% | 68.7% | 54.8% |
| 240 | 33.0% | 99.1% | 97.2% | 93.4% | 87.1% | 78.1% |
| 300 | 39.4% | 99.8% | 99.3% | 98.1% | 95.6% | 92.3% |
| 400 | 48.8% | 99.9% | 99.9% | 99.8% | 99.7% | 99.1% |
| 480 | 55.1% | 99.9% | 99.9% | 99.9% | 99.9% | 99.9% |
| 600 | 63.2% | 99.9% | 99.9% | 99.9% | 99.9% | 99.9% |

TABLE 8
48 Marker Specificity

| | Minimum | Minimum | Minimum | Minimum | Minimum |
|---|---|---|---|---|---|
| Individual | 4 | 5 | 6 | 7 | 8 |
| marker FP | Markers | Markers | Markers | Markers | Markers |
| rate | Positive | Positive | Positive | Positive | Positive |
| 2% | 96.9% | 99.4% | 99.9% | 99.9% | 99.9% |
| 3% | 84.3% | 95.8% | 99.1% | 99.8% | 99.9% |
| 4% | | 82.5% | 95.0% | 98.8% | 99.8% |
| 5% | | | | 94.3% | 98.6% |

TABLE 9
72 Marker Sensitivity; Avg. Indiv. Mkr,: 50% Sensitivity

| Average | | | | | | | | |
|---|---|---|---|---|---|---|---|---|
| Number of | | 72 markers, | 72 markers, | 72 markers, | 72 markers, | 72 markers, | 72 markers, | 72 markers, |
| Molecules | Mutation, | Minimum 6 | Minimum 7 | Minimum 8 | Minimum 9 | Minimum 10 | Minimum 11 | Minimum 12 |
| in Blood | 1 Positive | Positive | Positive | Positive | Positive | Positive | Positive | Positive |
| 150 | 22.1% | 88.4% | 79.3% | 67.6% | 54.4% | 41.3% | 29.4% | 19.7% |
| 200 | 28.1% | 98.0% | 95.4% | 91.0% | 84.5% | 75.8% | 65.3% | 53.8% |
| 240 | 33.0% | 99.6% | 98.9% | 97.5% | 94.9% | 90.8% | 84.9% | 77.2% |
| 300 | 39.4% | 99.9% | 99.9% | 99.7% | 99.3% | 98.5% | 97.0% | 94.5% |
| 400 | 48.8% | 99.9% | 99.9% | 99.9% | 99.9% | 99.9% | 99.9% | 99.7% |
| 480 | 55.1% | 99.9% | 99.9% | 99.9% | 99.9% | 99.9% | 99.9% | 99.9% |
| 600 | 63.2% | 99.9% | 99.9% | 99.9% | 99.9% | 99.9% | 99.9% | 99.9% |

TABLE 10
72 Marker Specificity

| Individual | Minimum | Minimum | Minimum | Minimum | Minimum | Minimum | Minimum |
|---|---|---|---|---|---|---|---|
| marker FP | 6 Markers | 7 Markers | 8 Markers | 9 Markers | 10 Markers | 11 Markers | 12 Markers |
| rate | Positive | Positive | Positive | Positive | Positive | Positive | Positive |
| 2% | 99.0% | 99.8% | 100.0% | 100.0% | 100.0% | 100.0% | 100.0% |
| 3% | 88.6% | 96.8% | 99.2% | 99.8% | 100.0% | 100.0% | 100.0% |
| 4% | | | 92.2% | 97.8% | 99.4% | 99.9% | 100.0% |
| 5% | | | | 83.4% | 94.8% | 98.5% | 99.6% |

TABLE 11
96 Marker Sensitivity; Avg. Indiv. Mkr,: 50% Sensitivity

| Average | | | | | | | | |
|---|---|---|---|---|---|---|---|---|
| Number of | | 96 markers, | 96 markers, | 96 markers, | 96 markers, | 96 markers, | 96 markers, | 96 markers, |
| Molecules | Mutation, | Minimum 7 | Minimum 8 | Minimum 9 | Minimum 10 | Minimum 11 | Minimum 12 | Minimum 13 |
| in Blood | 1 Positive | Positive | Positive | Positive | Positive | Positive | Positive | Positive |
| 150 | 22.1% | 95.4% | 91.0% | 84.5% | 75.8% | 65.3% | 53.8% | 42.4% |
| 200 | 28.1% | 99.6% | 99.0% | 97.8% | 95.7% | 92.3% | 87.3% | 80.7% |
| 240 | 33.0% | 99.9% | 99.9% | 99.7% | 99.2% | 98.3% | 96.8% | 94.4% |
| 300 | 39.4% | 99.9% | 99.9% | 99.9% | 99.9% | 99.9% | 99.7% | 99.5% |
| 400 | 48.8% | 99.9% | 99.9% | 99.9% | 99.9% | 99.9% | 99.9% | 99.9% |
| 480 | 55.1% | 99.9% | 99.9% | 99.9% | 99.9% | 99.9% | 99.9% | 99.9% |
| 600 | 63.2% | 99.9% | 99.9% | 99.9% | 99.9% | 99.9% | 99.9% | 99.9% |

TABLE 12
96 Marker Specificity

| Individual | Minimum | Minimum | Minimum | Minimum | Minimum | Minimum | Minimum |
|---|---|---|---|---|---|---|---|
| marker FP | 7 Markers | 8 Markers | 9 Markers | 10 Markers | 11 Markers | 12 Markers | 13 Markers |
| rate | Positive | Positive | Positive | Positive | Positive | Positive | Positive |
| 2% | 98.5% | 99.7% | 99.9% | 100.0% | 100.0% | 100.0% | 100.0% |
| 3% | | 91.3% | 97.4% | 99.3% | 99.8% | 100.0% | 100.0% |
| 4% | | | | 88.2% | 96.3% | 99.0% | 99.7% |
| 5% | | | | | | 84.7% | 95.1% |

[0258] From the above tables, the receiver operating characteristic (ROC) curves may be calculated by plotting Sensitivity vs. 1-Specificity. Since these are theoretical calculations, the curves were generated for different levels of average marker false-positive rates of 2%, 3%, 4%, and 5%. To assist in visualizing the graphs and calculating the AUC (Area under curve), the edges were set at 100% and 0%, respectively. The ROC curves for 24 marker, 3% & 4% average marker false-positives, 36 marker, 3% & 4% average marker false-positives, and 48 marker, 2%, 3%, 4% & 5% average marker false-positives are provided in Table 13 below and for 48 Markers illustrated in FIGS. 23 and 24, respectively. Generally, the closer the AUC is to 1, the more accurate the test—values of >95% are desirable, and values >99% are superb. Using the benchmark of an average of 300 molecules in the blood for early cancer (Stage I & II), AUC values are at 95% with 24 markers, improve to 99% with 36 markers, and range from 98% to >99% with 48 markers, depending on average marker false-positive values. These graphs provide an illustration of the power of multiple marker assays for achieving good sensitivities and specificities.

TABLE 13
24, 36, & 48 Marker AUC Values from ROC Curves; Avg. Indiv. Mkr,: 50% Sensitivity

| Total | | | | | | | |
|---|---|---|---|---|---|---|---|
| Markers: | | | | | | | |
| Individual | | | | | | | |
| marker FP | 150 | 200 | 240 | 300 | 400 | 480 | 600 |
| rate | Molecules | Molecules | Molecules | Molecules | Molecules | Molecules | Molecules |
| 24 Mkrs: 3% | 77% | 87% | | 96% | 99% | >99% | >99% |
| 24 Mkrs: 4% | 74% | 85% | | 95% | 99% | >99% | >99% |
| 36 Mkrs: 3% | 87% | 95% | 98% | 99% | >99% | >99% | >99% |
| 36 Mkrs: 4% | 78% | 89% | 95% | 98% | 99% | >99% | >99% |
| 48 Mkrs: 2% | 92% | 98% | 99% | >99% | >99% | >99% | >99% |
| 48 Mkrs: 3% | 89% | 97% | 99% | >99% | >99% | >99% | >99% |
| 48 Mkrs: 4% | 81% | 93% | 98% | 99% | >99% | >99% | >99% |
| 48 Mkrs: 5% | 71% | 86% | 94% | 98% | 99% | 99% | 99% |

[0259] How would the above markers work in a one-step cancer assay? To illustrate the challenges of developing an early cancer detection screen, consider the challenge of screening 107 million adults in the U.S. over the age of 50 for colorectal cancer—of which there are about 135,000 new cases that are diagnosed a year. In this example, if there is an average of 300 molecules in the blood for early cancer (Stage I & II), and taking the best-case scenario of individual marker FP rate is 2%, then if there is a 3-marker minimum, then overall FP rate is 1.6% for 24 markers, for a specificity of 98.4% (See FIG. 20B). At 3 markers, for Stage I & II cancer (at about 300 molecules of each positive marker in the blood), the test would miss 6.2%; i.e. for Stage I & II cancer the overall sensitivity would be 93.8% (See FIG. 20A), e.g. the test would correctly identify 93.8% of individuals with disease, which would be 126,630 individuals (out of 135,000 new cases). At a specificity of 98.4%, for 107 million individuals screened, the test would also generate 1.6%×107,000,000=1,712,000 false positives. Thus, the positive predictive value would be 126,630/(126,630+1,712,000)=around 6.8%, in other words, only one in 14 individuals who tested positive would actually have colorectal cancer, the rest would be false-positives.

[0260] However, if the individual marker FP rate is more realistic, say 4%, then more markers will be required to achieve better than 98% specificity, and this will be at the cost of sensitivity. If individual marker FP rate is 4%, then if there is a 5-marker minimum, then overall FP rate is 0.4% for 24 markers, for a specificity of 99.6% (See FIG. 20B). At 5 markers, for Stage I & II cancer (at about 300 molecules of each positive marker in the blood), the test would miss 28.5%; i.e. for Stage I & II cancer the overall sensitivity would be 71.5% (See FIG. 20A), e.g. the test would correctly identify 71.5% of individuals with disease, which would be 90,540 individuals (out of 135,000 new cases). At a specificity of 99.6%, for 107 million individuals screened, the test would also generate 0.4%×107,000,000=428,000 false positives. Thus, the positive predictive value would be 90,540/(90,540+428,000)=around 17.5%, in other words, only one in 5.7 individuals who tested positive would actually have colorectal cancer, the rest would be false-positives. A PPV of 17.5% is quite respectable, however, it would be achieved at the cost of missing 28.5% of early cancer.

[0261] The first step and the second step are carried out using a method of the present application. The first step uses markers to cover many cancers, where the aim is to obtain high sensitivity for early cancers where the number of marker molecules in the blood may be limited. The second step then would score for additional markers to verify that the initial result was a true positive, as well as to identify the likely tissue of origin. The second step may include the methods described herein, and/or additional methods such as next-generation sequencing.

[0262] To illustrate one embodiment of how such a two-step cancer test may be designed, consider again the challenge of identifying patients with early colorectal cancer. In 2017, there were an estimated 95,520 new cases of colon cancer and 39,910 cases of rectal cancer diagnosed in the U.S.—for a total of about 135,000 new cases. Consider an initial test using 24 markers. In this example, if there is an average of 300 molecules in the blood for early cancer (Stage I & II), and if that would cover at least one mutation, then the sensitivity for identifying such a cancer by next generation sequencing would be 39.4% (See FIG. 20A). If the individual marker FP rate is 3%, then if there is a 3-marker minimum, then overall FP rate is 5.4% for 24 markers, for a specificity of 94.6% (See FIG. 20B). At 3 markers, for Stage I & II cancer (at about 300 molecules of each positive marker in the blood), the test would miss 6.2%; i.e. for Stage I & II cancer the overall sensitivity would be 93.8% (See FIG. 20A). Note that these levels of sensitivity and specificity are better than the current tests on the market. However, if the individual marker FP rate is 5%, then if there is a 4-marker minimum, then overall FP rate is 6.6% for 24 markers, for a specificity of 93.4% (See FIG. 20B). At 4 markers, for Stage I & II cancer (at about 300 molecules of each positive marker in the blood), the test would miss 15.1%; i.e. for Stage I & II cancer the sensitivity would be 84.9% (See FIG. 20A). These graphs illustrate a basic conflict of most diagnostic tests—improve the sensitivity of a test (i.e. less false-negatives), but sacrifice the test specificity (i.e. more false-positives), or improve the specificity of a test (less false-positives) at the risk of losing the test sensitivity (i.e. more false-negatives).

[0263] By using a two-step cancer test, the parameters may be adjusted to improve BOTH sensitivity and specificity. For example, the aforementioned 24 marker test, using 3 markers, for Stage I & II cancer (at about 300 molecules of each positive marker in the blood), the overall sensitivity would be 93.8%. Those samples that are scored as positives in the first step (24-markers specific to GI cancers)—including the false-positives would be retested in the second step with an expanded panel of 48 markers to provide coverage of colorectal cancers. If the individual marker FP rate is 3%, then if there is a 5-marker minimum, then overall FP rate is 4.2% for 48 markers, for a specificity of 95.8% (See FIG. 22B). At 5 markers, for Stage I & II cancer (at about 300 molecules of each positive marker in the blood), the test would miss 0.7%; i.e. for Stage I & 2 cancer the sensitivity would be 99.3% (See FIG. 22A). Technically, since the samples were already culled in the first step, the overall sensitivity is 93.8%×99.3%=93.1%. If the individual marker FP rate is 3%, then if there is a 6-marker minimum, then overall FP rate is <1% for 48 markers, for a specificity of 99.1% (See FIG. 20B). At 6 markers, for Stage I & II cancer (at about 300 molecules of each positive marker in the blood), the test would miss 1.9%; i.e. for Stage I & II cancer the sensitivity would be 98.1% (See FIG. 22A). Since the samples were already culled in the first step, the overall sensitivity is 93.8%×98.1%=92.0%. If the individual marker FP rate is 3%, then if there is a 7-marker minimum, then overall FP rate is <0.2% for 48 markers, for a specificity of 99.8% (See FIG. 22B). At 7 markers, for Stage I & II cancer (at about 300 molecules of each positive marker in the blood), the test would miss 4.4%; i.e. for Stage I & II cancer the sensitivity would be 95.6% (See FIG. 22A). Since the samples were already culled in the first step, the overall sensitivity is 93.8%×95.6%=89.7%.

[0264] Returning to the example of colorectal cancer, in particular the cases of microsatellite stable tumors (MSS) where the mutation load is low, for these calculations when relying on NGS sequencing alone (assuming 300 molecules with one mutation in the blood), an estimated 60% of early colorectal cancer would be missed. Again, to put these number in perspective, in the U.S., about 135,000 new cases of colorectal cancer are predicted in 2018. About 107 million individuals in the U.S. are over the age of 50 and should be tested for colorectal cancer. With the assumption of these samples containing at least 300 molecules with one mutation in the blood, such a test would find 54,000 men and women (out of 135,000 new cases) with colorectal cancer. However, with a specificity for sequencing at 98%, there would be about 2.1 million false-positives. The positive predictive value of such a test would be around 2.6%, in other words, only one in 39 individuals who tested positive would actually have colorectal cancer, the rest would be false-positives. In contrast, consider the two-step methylation marker test described above, wherein the first step has 24 methylation markers specific to GI cancers, while the second step has 48 methylation markers specific to colorectal cancer. In this example, as above, the calculations are done with the anticipation of an average of 300 methylated (or hydroxymethylated) molecules per positive marker in the blood. Assuming individual marker false-positive rates of 3%, and with the first step requiring a minimum of 3 markers positive, then with an overall specificity of 94.6%, the first step would identify 5,778,000 individuals (out of 107,000,000 total adults over 50 in the U.S.) which would include at 93.8% sensitivity about 126,630 individuals with Stage I & II colorectal cancer (out of 135,000 total). However, those 5,778,000 presumptive positive individuals would be evaluated in the second step of 48 markers requiring a minimum of 6 markers positive, then the two-step test would identify 98.1%×93.8%=92.0%=124,200 individuals (out of 135,000 new cases) with colorectal cancer. With a specificity of 99.1%, the second test would also generate 5,778,000×0.9%=52,000 false-positives. The positive predictive value of such a test would be 124,200/176,200=70.5%, in other words, 2 in 3 individuals who tested positive would actually have colorectal cancer, an extraordinarily successful screen to focus on those patients who would most benefit from follow-up colonoscopy. The benefit in lives saved would be of incalculable value.

[0265] While the foregoing discussion has focused on methylation markers, with an average sensitivity of 50%, and individual marker false-positives ranging from 2%-5%, there are many other markers of cancer with varying sensitivities and specificities. In general, protein markers (with the exception of PSA and PSMA) have been of limited clinical utility for detection of early cancer because the false-positives are so high, resulting in very low positive predictive value. Cancer markers from bodily fluids (i.e. plasma, urine) include, but are not limited to plasma microRNAs (miRNA); mutations or methylation in cfDNA; exosomes with surface cancer-specific protein markers, or internal miRNA, ncRNA, lncRNA, mRNA, DNA; circulating cytokines, circulating proteins, or circulating antibodies against cancer-antigens; or nucleic-acid markers in whole blood (for review, see Nikolaou et al., “Systematic Review of Blood Diagnostic Markers in Colorectal Cancer,” Techniques in Coloproctology (2018), which is hereby incorporated by reference in its entirety). Several methods have been reported for detecting cancer-specific miRNAs in the serum or plasma of patients with colorectal (or others) cancers; these miRNAs include, but are not limited to: miR-1290; miR-21; miR-24; miR-320a; miR-423-5p; miR-29a; miR-125b; miR-17-3p; miR-92a; miR-19a; miR-19b; miR-15b; mir23a; miR-150; miR-223; miR-1229; miR-1246; miR-612; miR-1296; miR-933; miR-937; miR-1207; miR-31; miR-141; miR-224-3p; miR-576-5p; miR-885-5p; miR-200c; miR-203 (Imaoka et al., “Circulating MicroRNA-1290 as a Novel Diagnostic and Prognostic Biomarker in Human Colorectal Cancer,” Ann. Oncol. 27(10):1879-1886 (2016); Zhang et al., “Diagnostic and Prognostic Value of MicroRNA-21 in Colorectal Cancer: an Original Study and Individual Participant Data Meta-Analysis,” Cancer Epidemiol. Biomark. Prev. 23(12):2783-2792 (2016); Fang et al., “Plasma Levels of MicroRNA-24, MicroRNA-320a, and Micro-RNA-423-5p are Potential Biomarkers for Colorectal Carcinoma,” J. Exp. Clin. Cancer Res. 34:86 (2015); Toiyama et al., “MicroRNAs as Potential Liquid Biopsy Biomarkers in Colorectal Cancer: A Systematic Review,” Biochim. Biophys. Acta. pii: 50304-419X(18)30067-2 (2018); Nagy et al., “Comparison of Circulating miRNAs Expression Alterations in Matched Tissue and Plasma Samples During Colorectal Cancer Progression,” Pathol. Oncol. Res. doi: 10.1007/s12253-017-0308-1 (2017); Wang et al., “Novel Circulating MicroRNAs Expression Profile in Colon Cancer: a Pilot Study,” Eur. J. Med. Res. 22(1):51 (2017); U.S. Pat. No. 9,689,036 to Getts et at; U.S. Pat. No. 9,708,643 to Duttagupta et al.; U.S. Pat. No. 9,868,992 to God et al; U.S. Pat. No. 9,926,603 to Sozzi et al., which are hereby incorporated by reference in their entirety). Additional approaches for detecting low abundance miRNA are described in WO2016057832A2, which is hereby incorporated by reference in its entirety, or using other suitable means known in the art. FIG. 25 provides a list of blood-based, colon cancer-specific microRNA markers derived through analysis of TCGA microRNA datasets, which may be present in exosomes, tumor-associated vesicles, Argonaute complexes, or other protected states in the blood.

[0266] Several methods have been reported for detecting cancer-specific ncRNA or lncRNAs in the serum, plasma, or exosomes of patients with colorectal (and other) cancers; these ncRNAs include, but are not limited to: NEAT_v1; NEAT_v2; CCAT1; HOTAIR; CRNDE-h; H19; MALAT1; 91H; GASS (Wu et al., “Nuclear-enriched Abundant Transcript 1 as a Diagnostic and Prognostic Biomarker in Colorectal Cancer,” Mol. Cancer 14:191 (2015); Zhao et al., “Combined Identification of Long Non-Coding RNA CCAT1 and HOTAIR in Serum as an Effective Screening for Colorectal Carcinoma,” Int. J. Clin. Exp. Pathol. 8(11):14131-40 (2015); Liu et al., “Exosomal Long Noncoding RNA CRNDE-h as a Novel Serum-Based Biomarker for Diagnosis and Prognosis of Colorectal Cancer,” Oncotarget 7 (51):85551-85563 (2016); Slaby 0, “Non-coding RNAs as Biomarkers for Colorectal Cancer Screening and Early Detection,” Adv Exp Med Biol. 937:153-70 (2016); Gao et al., “Exosomal lncRNA 91H is Associated With Poor Development in Colorectal Cancer by Modifying HNRNPK Expression,” Cancer Cell Int. 23; 18:11 (2018); Liu et al., “Prognostic and Predictive Value of Long Non-Coding RNA GASS and MicroRNA-221 in Colorectal Cancer and Their Effects on Colorectal Cancer Cell Proliferation, Migration and Invasion,” Cancer Biomark. 22(2):283-299 (2018); U.S. Pat. No. 9,410,206 to Hoon et al.; U.S. Pat. No. 9,921,223 to Kalluri et al., which are hereby incorporated by reference in their entirety). Additional approaches for detecting low abundance lncRNA, ncRNA, mRNA translocations, splice variants, alternative transcripts, alternative start sites, alternative coding sequences, alternative non-coding sequences, alternative splicing, exon insertions, exon deletions, and intron insertions are described in WO2016057832A2, which is hereby incorporated by reference in its entirety, or using other suitable means known in the art. FIG. 26 provides a list of blood-based, colon cancer-specific ncRNA and lncRNA markers derived through analysis of various publicly available Affymetrix Exon ST CEL data, which were aligned to GENCODE annotations to generate ncRNA and lncRNA transriptome datasets. Comparative analyses across these datasets (various cancer types, along with normal tissues, and peripheral blood) were conducted to generate the ncRNA and lncRNA markers list. Such lncRNA and ncRNA may be enriched in exosomes or other protected states in the blood. In addition, FIG. 27 provides a list of blood-based colon cancer-specific exon transcripts that may be enriched in exosomes, tumor-associated vesicles, or other protected states in the blood.

[0267] The most common protein marker for colorectal cancer is based on detecting hemoglobin from blood in the stool and is known as the FOBT or FIT test. Sensitivity and specificities (Sens.: Spec.) for these tests have been reported as: OC-Light iFOB Test (also called OC Light S FIT), manufactured by Polymedco (78.6%-97.0%:88.0%-92.8%); QuickVue iFOB, manufactured by Quidel (91.9%:74.9%); Hemosure One-Step iFOB Test, manufactured by Hemosure, Inc. (54.5%:90.5%); InSure FIT, manufactured by ClinicalGenomics (75.0%:96.6%); Hemoccult-ICT, manufactured by Beckman Coulter (23.2%-81.8%: 95.8%-96.9%); Cologuard—stool FIT-DNA, manufactured by Exact Sciences (92.3%; 84.4%). The large ranges and differences in sensitivities and specificities may reflect the range from early to late cancer, as well as differences in methodology, number of samples collected, and clinical study size. Cut-off values for FIT tests may range from 10 ug protein/gram stool to 300 ug protein/gram stool (See Robertson et al., “Recommendations on Fecal Immunochemical Testing to Screen for Colorectal Neoplasia: a Consensus Statement by the US Multi-Society Task Force on Colorectal Cancer,” Gastrointest. Endosc. 85(1):2-21 (2017), which is hereby incorporated by reference in its entirety).

[0268] A number of tumor-associated antigens elicit an immune response within the patient, and these may be identified as autoantibodies, or indirectly as increased cytokines in the serum. Some tumor antigens may be detected directly within the serum, or on the surface of cancer-associated exosomes or extracellular vesicles, while others may be detected indirectly, for example by an increase in mRNA within cancer-associated exosomes or extracellular vesicles. These cancer-specific protein markers may be identified through, mRNA sequences, protein expression levels, protein product concentrations, cytokines, or autoantibody to the protein product, and these markers include but are not limited to: RPH3AL; RPL36; SLP2; TP53; Survivin; ANAXA4; SEC61B; CCCAP; NYCO16; NMDAR; PLSCR1; HDAC5; MDM2; STOML2; SEC61-beta; IL8; TFF3; CA11-19; IGFBP2; DKK3; PKM2; DC-SIGN; DC-SIGNR; GDF-15; AREG; FasL; Flt3L; IMPDH2; MAGEA4; BAG4; IL6ST; VWF; EGFR; CD44; CEA; NSE; CA 19-9, CA 125; NMMT; PSA; proGRP; DPPIV/seprase complex; TFAP2A; E2F5; CLIC4; CLIC1; TPM1; TPM2; TPM3; TPM4; CTSD-30; PRDX-6; LRG1; TTR; CLU; KLKB1; C1R; KLK3; KLK2; HOXB13; GHRL2; FOXA1 (Fan et al., “Development of a Multiplexed Tumor-Associated Autoantibody-Based Blood Test for the Detection of Colorectal Cancer,” Clin. Chim. Acta. 475:157-163 (2017); Xia et al., “Prognostic Value, Clinicopathologic Features and Diagnostic Accuracy of Interleukin-8 in Colorectal Cancer: a Meta-Analysis,” PLoS One 10(4):e0123484 (2015); Li et al., “Serum Trefoil Factor 3 as a Protein Biomarker for the Diagnosis of Colorectal Cancer,” Technol. Cancer. Res. Treat. 16(4):440-445 (2017); Overholt et al., “CA11-19: a Tumor Marker for the Detection of Colorectal Cancer,” Gastrointest. Endosc. 83(3):545-551 (2016); Fung et al., “Blood-based Protein Biomarker Panel for the Detection of Colorectal Cancer,” PLoS One 10(3): e0120425 (2015); Jiang et al., “The Clinical Significance of DC-SIGN and DC-SIGNR, Which are Novel Markers Expressed in Human Colon Cancer,” PLoS One 9(12):e11474 (2014).; Chen et al., “Development and Validation of a Panel of Five Proteins as Blood Biomarkers for Early Detection of Colorectal Cancer,” Clin. Epidemiol. 9:517-526 (2017); Chen et al., “Prospective Evaluation of 64 Serum Autoantibodies as Biomarkers for Early Detection of Colorectal Cancer in a True Screening Setting,” Oncotarget 7(13):16420-32 (2016); Rho et al., “Protein and Glycomic Plasma Markers for Early Detection of Adenoma and Colon Cancer,” Gut 67(3):473-484 (2018); U.S. Pat. No. 9,518,990 to Wild et al.; U.S. Pat. No. 9,835,636 to Chan et al.; U.S. Pat. No. 9,885,718 to Man et al.; U.S. Pat. No. 9,889,135 to Andy Koff et al.; U.S. Pat. No. 9,903,870 to Speicher et at; U.S. Pat. No. 9,914,974 to Bajic et al.; U.S. Pat. No. 9,983,208 to Choi et al; U.S. Pat. No. 10,030,271 to Scher et al., which are hereby incorporated by reference in their entirety). Additional approaches for detecting low abundance mRNA translocations, splice variants, alternative transcripts, alternative start sites, alternative coding sequences, alternative non-coding sequences, alternative splicing, exon insertions, exon deletions and intron insertions are described in WO2016057832A2, which is hereby incorporated by references in its entirety, or using other suitable means known in the art. FIG. 28 provides a list of cancer protein markers, identified through mRNA sequences, protein expression levels, protein product concentrations, cytokines, or autoantibody to the protein product arising from colorectal tumors, which may be identified in the blood, either within exosomes, other protected states, tumor-associated vesicles, or free within the plasma. FIG. 29 provides protein markers that can be secreted by colorectal tumors into the blood. A comparative analysis was performed across various TCGA datasets (tumors, normals), followed by an additional bioinformatics filter (Meinken et al., “Computational Prediction of Protein Subcellular Locations in Eukaryotes: an Experience Report,” Computational Molecular Biology 2(1):1-7 (2012), which is hereby incorporated by reference in its entirety), which predicts the likelihood that the translated protein is secreted by the cells.

[0269] The distribution of mutations in colorectal cancers are available in the public COSMIC database, with the 20 most commonly altered genes listed as: APC; TP53; KRAS; FAT4; LRP1B; PIK3CA; TGFBR2; ACVR2A; BRAF; ZFHX3; KMT2C; KMT2D; FBXW7; SMAD4; ARID1A; TRRAP; RNF43: FAT1; TCF7L2; PREX2 (Forbes et al., “COSMIC: Exploring the World's Knowledge of Somatic Mutations in Human Cancer,” Nucleic Acids Res. 43(Database issue):D805-811 (2015), which is hereby incorporated by reference in its entirety). Analysis of TCGA COADREAD mutational dataset, however indicate the following genes have at least 10% mutation rate among colorectal cancer primary tumors: APC, TP53, KRAS, TTN, SYNE1, PIK3CA, FAT4, MUC16, FBXW7, LRP1B, LRP2, DNAH5, DMD, ANK2, RYR2, FLG, HMCN1, FAT2, TCF7L2, CSMD3, USH2A, SDK1, CSMD1, COL6A3, DNAH2, SMAD4, PKHD1, FAM123B, ATM, ACVR2A, MDN1, DCHS2, ZFHX4, CUBN, CSMD2, FREM2, RYR1, TGFBR2, RYR3, SACS, DNAH10, ABCA12, BRAF, ODZ1, PCDH9, MACF1, and AHNAK2. In addition to the approaches described herein, there are several approaches for enriching for and detecting low-abundance mutations either at the DNA or mRNA level (for example, mRNA within exosomes), including but not limited to next generation sequencing, allele-specific PCR, ARMS, primer-extension PCR, using blocking primers, full-COLD-PCR, fast-COLD-PCR, ice-COLD-PCR, E-ice-COLD-PCR, TT-COLD-PCR, etc. (Mauger et al., “COLD-PCR Technologies in the Area of Personalized Medicine: Methodology and Applications,” Mol. Diagn Ther. 3:269-283 (2017); Sefrioui et al., “Comparison of the Quantification of KRAS Mutations by Digital PCR and E-ice-COLD-PCR in Circulating-Cell-Free DNA From Metastatic Colorectal Cancer Patients,” Clin. Chim. Acta. 465:1-4 (2017); U.S. Pat. No. 9,062,350 to Platica; U.S. Pat. No. 9,598,735 to Song et al., which are hereby incorporated by reference in their entirety). Additional approaches for detecting low abundance mutations are described in WO2016057832A2, which is hereby incorporated by reference in its entirety, or using other suitable means known in the art. Methods to detect mutations, insertions, deletions, expression changes, copy number changes splice variants, translocations, mRNA, lncRNA, ncRNA, and miRNA using exPCR-LDR-qPCR and related techniques are described in the concurrently submitted PCT application entitled “Method and Markers for Identifying and Relative Quantifying of Nucleic Acid Sequence, Mutation, Expression, Splice Variant, Translocation, Copy Number, or Methylation Changes using Combinations of Bisulfite Treatment, Nuclease, Ligation, and Polymerase Reactions with Carryover Prevention” (Attorney Docket No. 147402.08281), which claims benefit of U.S. Provisional Patent Application Ser. No. 62/843,032, filed May 3, 2019, both of which are hereby incorporated by reference in their entirety, or using other suitable means known in the art. The best studied blood-based methylation markers for CRC detection are located in the promoter region of the SEPT9 gene (Church et al., “Prospective Evaluation of Methylated SEPT9 in Plasma for Detection of Asymptomatic Colorectal Cancer,” Gut 63(2):317-325 (2014); Lofton-Day et al., “DNA Methylation Biomarkers for Blood-Based Colorectal Cancer Screening,” Clinical Chemistry 54(2):414-423 (2008); Potter et al., “Validation of a Real-time PCR-based Qualitative Assay for the Detection of Methylated SEPT9 DNA in Human Plasma,” Clinical Chemistry 60(9):1183-1191 (2014); Ravegnini et al., “Simultaneous Analysis of SEPT9 Promoter Methylation Status, Micronuclei Frequency, and Folate-Related Gene Polymorphisms: The Potential for a Novel Blood-Based Colorectal Cancer Biomarker,” International Journal of Molecular Sciences 16(12):28486-28497 (2015); Toth et al., “Detection of Methylated SEPT9 in Plasma is a Reliable Screening Method for Both Left- and Right-sided Colon Cancers,” PloS One 7(9):e46000 (2012); Toth et al., “Detection of Methylated Septin 9 in Tissue and Plasma of Colorectal Patients With Neoplasia and the Relationship to the Amount of Circulating Cell-free DNA,” PloS One 9(12):e115415 (2014); Warren et al., “Septin 9 Methylated DNA is a Sensitive and Specific Blood Test for Colorectal Cancer,” BMC Medicine 9:133 (2011), which are hereby incorporated by reference in their entirety), and other potential markers for CRC diagnostics include CpG sites on promoter regions of THBD, C9orf50, ZNF154, AGBL4, FLI1, and TWIST1 (Lange et al., “Genome-scale Discovery of DNA-methylation Biomarkers for Blood-based Detection of Colorectal Cancer,” PloS One 7(11):e50266 (2012); Margolin et al., “Robust Detection of DNA Hypermethylation of ZNF154 as a Pan-Cancer Locus with in Silico Modeling for Blood-Based Diagnostic Development,” The Journal of Molecular Diagnostics: JMD 18(2):283-298 (2016); Lin et al., “Clinical Relevance of Plasma DNA Methylation in Colorectal Cancer Patients Identified by Using a Genome-Wide High-Resolution Array,” Ann. Surg. Oncol. 22 Suppl 3:S1419-1427 (2015), which are hereby incorporated by reference in their entirety).

[0270] SEPT9 methylation is the basis for Epi proColon test, a CRC-detection assay by Epigenomics (Lofton-Day et al:, “DNA Methylation Biomarkers for Blood-based Colorectal Cancer Screening,” Clinical Chemistry 54(2):414-423 (2008), which is hereby incorporated by reference in its entirety). While initial results on smaller sample sets showed promise, large-scale studies with 1,544 plasma samples showed a sensitivity of 64% for stage I-III CRC, and a specificity of 78%-82%, effectively sending 180 to 220 out of 1,000 individuals to unnecessary colonoscopies (Potter et al., “Validation of a Real-time PCR-based Qualitative Assay for the Detection of Methylated SEPT9 DNA in Human Plasma,” Clinical Chemistry 60(9):1183-1191 (2014), which is hereby incorporated by reference in its entirety). ClinicalGenomics is currently developing blood-based CRC detection test based on the methylation of the BCAT1 and IKZF1 genes (Pedersen et al., “Evaluation of an Assay for Methylated BCAT1 and IKZF1 in Plasma for Detection of Colorectal Neoplasia,” BMC Cancer 15:654 (2015), which is hereby incorporated by reference in its entirety). Large-scale studies using 2,105 plasma samples of this two-marker test showed an overall sensitivity of 66%, with 38% for stage I CRC, and an impressive specificity of 94%. Exact Sciences and collaborators have slightly improved the sensitivity of CRC fecal tests (Bosch et al., “Analytical Sensitivity and Stability of DNA Methylation Testing in Stool Samples for Colorectal Cancer Detection,” Cell Oncol. (Dordr) 35(4):309-315 (2012); Hong et al., “DNA Methylation Biomarkers of Stool and Blood for Early Detection of Colon Cancer,” Genet. Test. Mol. Biomarkers 17(5):401-406 (2013); Imperiale et al., “Multitarget Stool DNA Testing for Colorectal-Cancer Screening,” N. Engl. J. Med. 370(14):1287-1297 (2014); Xiao et al., “Validation of Methylation-Sensitive High-resolution Melting (MS-HRM) for the Detection of Stool DNA Methylation in Colorectal Neoplasms,” Clin. Chim. Acta. 431:154-163 (2014); Yang et al., “Diagnostic Value of Stool DNA Testing for Multiple Markers of Colorectal Cancer and Advanced Adenoma: a Meta-Analysis,” Can. J. Gastroenterol. 27(8):467-475 (2013), which are hereby incorporated by reference in their entirety), by adding K-ras mutation as well as BMP3 and NDRG4 methylation markers (Lidgard et al., “Clinical Performance of an Automated Stool DNA Assay for Detection of Colorectal Neoplasia,” Clin. Gastroenterol. Hepatol. 11(10):1313-1318 (2013), which is hereby incorporated by reference in its entirety). Epigenetic changes may mark not only the DNA (as methylation or hydroxy-methylation of promoter CpG sites) but also by appending methyl or acetyl groups on the histone proteins that bind to these promoters. These different epigenetic marks may be detected in circulating nucleosomes of colorectal cancer patients (Rahier et al., “Circulating Nucleosomes as New Blood-based Biomarkers for Detection of Colorectal Cancer,” Clin Epigenetics 9:53 (2017), which is hereby incorporated by reference in its entirety). The identification of blood-based, cancer-specific methylation markers has employed the entire TCGA Illumina 450K methylation datasets (consisting of primary tumors, matching normal for 33 types of cancer including CRC), along with additional methylation datasets (primary tumors, normal tissues, cell lines, peripheral blood, immune cells) from the Gene Expression Omnibus (GEO). In order to identify CRC-specific methylation markers, comparative statistical analyses of these datasets were used to identify candidate methylation markers with the following characteristics: highly methylated (or hydroxymethylated) in CRC tissues and cell lines, unmethylated in normal colon, unmethylated in peripheral blood and immune infiltrates, unmethylated in most other cancer types. Validating the bioinformatic scheme, these methodologies also identified CpG sites previously reported to be hypermethylated in plasma from CRC patients (Church et al., “Prospective Evaluation of Methylated SEPT9 in Plasma for Detection of Asymptomatic Colorectal Cancer,” Gut 63(2):317-325 (2014); Lofton-Day et al., “DNA Methylation Biomarkers for Blood-based Colorectal Cancer Screening,” Clinical Chemistry 54(2):414-423 (2008); Toth et al., “Detection of Methylated SEPT9 in Plasma is a Reliable Screening Method for Both Left- and Right-sided Colon Cancers,” PloS One 7(9):e46000 (2012); Warren et al., “Septin 9 Methylated DNA is a Sensitive and Specific Blood Test for Colorectal Cancer,” BMC Medicine 9:133 (2011); Lange et al., “Genome-scale Discovery of DNA-methylation Biomarkers for Blood-based Detection of Colorectal Cancer,” PloS One 7(11):e50266 (2012); Margolin et al., “Robust Detection of DNA Hypermethylation of ZNF154 as a Pan-Cancer Locus with in Silico Modeling for Blood-Based Diagnostic Development,” The Journal of Molecular Diagnostics: JMD 18(2):283-298 (2016); Lin et al., “Clinical Relevance of Plasma DNA Methylation in Colorectal Cancer Patients Identified by Using a Genome-Wide High-Resolution Array,” Ann. Surg. Oncol. 22 Suppl 3:S1419-1427 (2015); Pedersen et al., “Evaluation of an Assay for Methylated BCAT1 and IKZF1 in Plasma for Detection of Colorectal Neoplasia,” BMC Cancer 15:654 (2015), which are hereby incorporated by reference in their entirety). To ensure that these methylation sites were specific to CRC and not a result of aging-related methylation (McClay et al., “A Methylome-wide Study of Aging using Massively Parallel Sequencing of the Methyl-CpG-enriched Genomic Fraction from Blood in over 700 subjects,” Hum. Mol. Genet. 23(5):1175-1185 (2014), which is hereby incorporated by reference in its entirety), the Pearson correlation was calculated between levels of methylation and patient age. Furthermore, hypermethylation of these sites did not significantly correlate with MSI status, implying that markers have been identified for all CRC subtypes. Overall, ˜10,000 tissue samples, >4 billion datapoints (datapoint=CpG percentage methylation per sample) were analyzed to identify an initial list of few hundred CRC-specific markers. CpG markers consistently show up in many types of cancer and are labeled as potential Pan-Oncology markers. Additional approaches for detecting low abundance 5mC (or 5hmC) are described in WO2016057832A2, which is hereby incorporated by reference in its entirety, or using other suitable means known in the art. FIG. 30 provides a list of primary CpG sites that are Colorectal Cancer and Colon-tissue specific markers, that may be used to identify the presence of colorectal cancer from cfDNA, or DNA within exosomes, or DNA in other protected states (such as within CTCs) within the blood. FIG. 31 provides a list of chromosomal regions or sub-regions within which are primary CpG sites that are colorectal cancer and colon-tissue specific markers, that may be used to identify the presence of colorectal cancer from cfDNA, or DNA within exosomes, or DNA in other protected states (such as within CTCs) within the blood. FIG. 32 provides a list of primary and flanking CpG sites that are Colorectal Cancer and Colon-tissue specific markers, that may be used to identify the presence of colorectal cancer from cfDNA, or DNA within exosomes, or DNA in other protected states (such as within CTCs) within the blood. Primer sets for about 60 of these methylation markers are listed in Table 39 in the prophetic experimental section.

[0271] Mutation or methylation status may give a clear analytical cut-off, i.e. the assay either records a mutation or CpG methylation event, and false-positives are a consequence of biology, for example from age-related methylation. With other markers there may be a greater overlap between marker level for individuals with cancer and their matched normal controls, especially in attempting to identify cancer at the earliest stages. In such cases, cut-offs may be defined by “Z-score”, 2 standard deviations above normal values, or by setting the false-positive rate at an arbitrary level, i.e. 5% when evaluating a suitable set of age-matched normal samples. Generally, the set of age-matched normal should be suitably large enough to set cut-off of the marker-specific signal from a given disease sample at >85%; >90%; >95%; >96%; >97%; or >98% of the same marker-specific signals from the set of normal samples. The “Z-score” may be calculated using the formula: Z=(X−μ)/σ; where Z=Z-score, X=each value in the dataset, μ=mean of all values in the dataset, and σ=standard deviation of a sample. Likewise, when using the Z-score, the cut-off for marker-specific signal from a given disease sample may be set at a z-score of >1.03; >1.28; >1.65; >1.75; >1.88; or >2.05 compared to the same marker-specific signals from the set of normal samples In some assays, marker levels, (i.e. DNA methylation levels for several gene promoter regions in plasma, or miRNA levels in urine) are quantified in relation to another marker, either internal or externally added in a qPCR reaction, where the cut-off is determined as a ΔCt value in the assay (Fackler et al., “Novel Methylated Biomarkers and a Robust Assay to Detect Circulating Tumor DNA in Metastatic Breast Cancer,” Cancer Res. 74(8):2160-70 (2014); U.S. Pat. No. 9,416,404 to Sukumar et al., which are hereby incorporated by reference in their entirety). Methylation status at defined promoter regions may also be determined using digital bisulfite genomic sequencing and digital MethyLight assays; using bisulfite conversion and preferential amplification of converted methylated sequences by blocking primers that interfere with amplification of converted unmethylated sequences; or depletion of unmethylated DNA using methyl-sensitive restriction endonucleases, followed by PCR (see U.S. Pat. No. 9,290,803 to Laird et al.; U.S. Pat. No. 9,476,100 to Frumkin et al.; U.S. Pat. No. 9,765,397 to McEvoy et at; U.S. Pat. No. 9,896,732 to Tabori et al.; U.S. Pat. No. 9,957,575 to Kottwitz et al., which are hereby incorporated by reference in their entirety). More recently, an elegant technique for bisulfite-free DNA sequencing has been developed based on using TET1 and pyridine-borane for conversion of 5mC and 5hmC to DHU (Liu et al., “Bisulfite-Free Direct Detection of 5-methylcytosine and 5-hydroxymethylcytosine at Base Resolution,” Nat Biotechnol. 37:424-429 (2019), which is hereby incorporated by reference in its entirety).

[0272] The genome-wide methylation profile of cfDNA (known as the methylome) can be determined using next-generation sequencing, and the methylation pattern may be used to identify the presence of fetal, tumor, or other tissue DNA in the plasma (Sun et al., “Plasma DNA Tissue Mapping by Genome-wide Methylation Sequencing for Noninvasive Prenatal, Cancer, and Transplantation Assessments,” Proc. Natl. Acad. Sci. USA 112(40):E5503-12 (2015); Lehmann-Werman et al., “Identification of Tissue-specific Cell Death Using Methylation Patterns of Circulating DNA,” Proc. Natl. Acad. Sci. USA 113(13):E1826-34 (2016); U.S. Pat. No. 9,732,390 to Lo et al.; U.S. Pat. No. 9,984,201 to Zhang et al., which are hereby incorporated by reference in their entirety).

[0273] While the above calculations are based on increasing the sensitivity of one or two markers, what if the average sensitivity of individual markers was increased from 50% to 66%? FIGS. 33-35 illustrate results for calculated overall Sensitivity and Specificity for 24, 36, and 48 markers, respectively. These graphs are based on the assumption that the average individual marker sensitivity is 66%, and the average individual marker false-positive rate is from 2% to 5%. The sensitivity curves provide overall sensitivity as a function of the average number of molecules in the blood for each marker, with separate curves for each minimum number of markers needed to call a sample as positive. The specificity curves provide overall specificity as a function of individual marker false-positive rates, again with separate curves for each minimum number of markers needed to call a sample as positive. The calculated numbers for overall Sensitivity and Specificity for 24, 36, and 48 markers, respectively, where the average individual marker sensitivity is 50% (as described previously) or 66% are provided in the tables below.

TABLE 14
24 Markers Sensitivity;
Avg. Indiv. Mkr,: 50% Sensitivity

| Average | | | | |
|---|---|---|---|---|
| Number of | | 24 markers, | 24 markers, | 24 markers, |
| Molecules in | Mutation, 1 | Minimum 3 | Minimum 4 | Minimum 5 |
| Blood | Positive | Positive | Positive | Positive |
| 150 | 22.1% | 57.7% | 35.3% | 18.5% |
| 200 | 28.1% | 76.2% | 56.7% | 37.1% |
| 240 | 33.0% | 85.7% | 70.6% | 52.4% |
| 300 | 39.4% | 93.8% | 84.9% | 71.5% |
| 400 | 48.8% | 98.6% | 95.8% | 90.0% |
| 480 | 55.1% | 99.6% | 98.6% | 96.2% |
| 600 | 63.2% | 99.9% | 99.8% | 99.2% |

TABLE 15
24 Markers Sensitivity;
Avg. Indiv. Mkr,: 66% Sensitivity

| Average | | | | |
|---|---|---|---|---|
| Number of | | 24 markers, | 24 markers, | 24 markers, |
| Molecules | Mutation, | Minimum | Minimum | Minimum |
| in Blood | 1 Positive | 3 Positive | 4 Positive | 5 Positive |
| 150 | 22.1% | 76.2% | 56.7% | 37.1% |
| 200 | 28.1% | 89.8% | 77.5% | 61.0% |
| 240 | 33.0% | 95.4% | 88.1% | 76.5% |
| 300 | 39.4% | 98.6% | 95.8% | 90.0% |
| 400 | 48.8% | 99.8% | 99.3% | 98.0% |
| 480 | 55.1% | 100.0% | 99.9% | 99.6% |
| 600 | 63.2% | 100.0% | 100.0% | 100.0% |

TABLE 16
24 Marker Specificity

| Individual | Minimum | Minimum | Minimum |
|---|---|---|---|
| marker FP | 3 Markers | 4 Markers | 5 Markers |
| rate | Positive | Positive | Positive |
| 2% | 98.4% | 99.8% | 99.9% |
| 3% | 94.6% | 99.1% | 99.9% |
| 4% | 87.1% | 97.3% | 99.6% |
| 5% | | 93.4% | 98.7% |

TABLE 17
36 Marker Sensitivity;
Avg. Indiv. Mkr,: 50% Sensitivity

| Average | | 36 | 36 | 36 | 36 |
|---|---|---|---|---|---|
| Number of | | markers, | markers, | markers, | markers, |
| Molecules | Mutation, | Minimum | Minimum | Minimum | Minimum |
| in Blood | 1 Positive | 3 Positive | 4 Positive | 5 Positive | 6 Positive |
| 150 | 22.1% | 82.6% | 65.8% | 46.8% | 29.7% |
| 200 | 28.1% | 93.8% | 84.9% | 71.5% | 55.4% |
| 240 | 33.0% | 97.5% | 92.8% | 84.4% | 72.4% |
| 300 | 39.4% | 99.4% | 97.9% | 94.5% | 88.4% |
| 400 | 48.8% | 99.9% | 99.8% | 99.2% | 98.0% |
| 480 | 55.1% | 100.0% | 100.0% | 99.9% | 99.6% |
| 600 | 63.2% | 100.0% | 100.0% | 100.0% | 100.0% |

TABLE 18
36 Marker Sensitivity;
Avg. Indiv. Mkr,: 66% Sensitivity

| Average | | 36 | 36 | 36 | 36 |
|---|---|---|---|---|---|
| Number of | | markers, | markers, | markers, | markers, |
| Molecules | Mutation, | Minimum | Minimum | Minimum | Minimum |
| in Blood | 1 Positive | 3 Positive | 4 Positive | 5 Positive | 6 Positive |
| 150 | 22.1% | 93.8% | 84.9% | 71.5% | 55.4% |
| 200 | 28.1% | 98.6% | 95.8% | 90.0% | 80.9% |
| 240 | 33.0% | 99.6% | 98.6% | 96.2% | 91.6% |
| 300 | 39.4% | 99.9% | 99.8% | 99.2% | 98.0% |
| 400 | 48.8% | 100.0% | 100.0% | 100.0% | 99.9% |
| 480 | 55.1% | 100.0% | 100.0% | 100.0% | 100.0% |
| 600 | 63.2% | 100.0% | 100.0% | 100.0% | 100.0% |

TABLE 19
36 Marker Specificity

| Individual | Minimum | Minimum | Minimum | Minimum |
|---|---|---|---|---|
| marker FP | 3 Markers | 4 Markers | 5 Markers | 6 Markers |
| rate | Positive | Positive | Positive | Positive |
| 2% | 94.3% | 99.1% | 99.9% | 100.0% |
| 3% | 80.7% | 95.2% | 99.1% | 99.9% |
| 4% | | 84.9% | 96.1% | 99.2% |
| 5% | | | 88.2% | 97.0% |

TABLE 20
48 Marker Sensitivity; Avg. Indiv. Mkr,: 50% Sensitivity

| Average | | | | | | |
|---|---|---|---|---|---|---|
| Number of | | 48 markers, | 48 markers, | 48 markers, | 48 markers, | 48 markers, |
| Molecules | Mutation, | Minimum 4 | Minimum 5 | Minimum 6 | Minimum 7 | Minimum 8 |
| in Blood | 1 Positive | Positive | Positive | Positive | Positive | Positive |
| 150 | 22.1% | 84.9% | 71.6% | 55.6% | 39.6% | 25.8% |
| 200 | 28.1% | 95.8% | 90.1% | 80.9% | 68.7% | 54.8% |
| 240 | 33.0% | 99.1% | 97.2% | 93.4% | 87.1% | 78.1% |
| 300 | 39.4% | 99.8% | 99.3% | 98.1% | 95.6% | 92.3% |
| 400 | 48.8% | 99.9% | 99.9% | 99.8% | 99.7% | 99.1% |
| 480 | 55.1% | 99.9% | 99.9% | 99.9% | 99.9% | 99.9% |
| 600 | 63.2% | 99.9% | 99.9% | 99.9% | 99.9% | 99.9% |

TABLE 21
48 Marker Sensitivity; Avg. Indiv. Mkr,: 66% Sensitivity

| Average | | | | | | |
|---|---|---|---|---|---|---|
| Number of | | 48 markers, | 48 markers, | 48 markers, | 48 markers, | 48 markers, |
| Molecules | Mutation, | Minimum 4 | Minimum 5 | Minimum 6 | Minimum 7 | Minimum 8 |
| in Blood | 1 Positive | Positive | Positive | Positive | Positive | Positive |
| 150 | 22.1% | 95.8% | 90.0% | 80.9% | 68.7% | 54.7% |
| 200 | 28.1% | 99.3% | 98.0% | 95.2% | 90.3% | 82.9% |
| 240 | 33.0% | 99.9% | 99.6% | 98.8% | 97.1% | 94.0% |
| 300 | 39.4% | 100.0% | 100.0% | 99.9% | 99.6% | 99.0% |
| 400 | 48.8% | 100.0% | 100.0% | 100.0% | 100.0% | 100.0% |
| 480 | 55.1% | 100.0% | 100.0% | 100.0% | 100.0% | 100.0% |
| 600 | 63.2% | 100.0% | 100.0% | 100.0% | 100.0% | 100.0% |

TABLE 22
48 Marker Specificity

| Individual | Minimum | Minimum | Minimum | Minimum | Minimum |
|---|---|---|---|---|---|
| marker FP | 4 Markers | 5 Markers | 6 Markers | 7 Markers | 8 Markers |
| rate | Positive | Positive | Positive | Positive | Positive |
| 2% | 96.9% | 99.4% | 99.9% | 99.9% | 99.9% |
| 3% | 84.3% | 95.8% | 99.1% | 99.8% | 99.9% |
| 4% | | 82.5% | 95.0% | 98.8% | 99.8% |
| 5% | | | | 94.3% | 98.6% |

[0274] The above tables, and FIGS. 32 through 34, as well as FIGS. 20 through 22, allow for a direct comparison in the overall improvement in sensitivity when the average individual marker sensitivity improves from 50% to 66%. In this example, if there is an average of 150 molecules in the blood for the earliest cancer (Stage I), and if that would cover at least one mutation, then the sensitivity for identifying such a cancer by next generation sequencing would be 22.1% (See any of the aforementioned figures). For 24 markers, with a minimum of 3 markers positive and a 3% FP rate, overall sensitivity improves from 57.7% to 76.2%, when the average individual marker sensitivity improves from 50% to 66%, for detecting Stage I cancer (at about 150 molecules of each positive marker in the blood, see FIGS. 20A and 32A). If the individual marker FP rate is 3%, then if there is a 3-marker minimum, then overall FP rate is 5.4% for 24 markers, for a specificity of 94.6% (See FIG. 20B or 32B). However, if the individual marker FP rate is 5%, then if there is a 4-marker minimum, then overall FP rate is 6.6% for 24 markers, for a specificity of 93.4% (See FIG. 20B). At 4 markers, for Stage I cancer (at about 150 molecules of each positive marker in the blood), overall sensitivity improves from 35.3% to 56.7%, when the average individual marker sensitivity improves from 50% to 66% (See FIG. 20A, and FIG. 32A). For 36 markers, with a minimum of 3 markers positive and a 2% FP rate, overall sensitivity improves from 82.6% to 93.8%, when the average individual marker sensitivity improves from 50% to 66%, for detecting Stage I cancer (at about 150 molecules of each positive marker in the blood, see FIGS. 21A and 33A). If the individual marker FP rate is 2%, then if there is a 3-marker minimum, then overall FP rate is 5.7% for 36 markers, for a specificity of 94.3% (See FIG. 21B or 33B). However, if the individual marker FP rate is 3%, then the assay requires a 4-marker minimum, then overall FP rate is 4.8% for 36 markers, for a specificity of 95.2% (See FIG. 21B). At 4 markers, for Stage I cancer (at about 150 molecules of each positive marker in the blood), overall sensitivity improves from 65.8% to 84.9%, when the average individual marker sensitivity improves from 50% to 66% (See FIG. 21A and FIG. 33A). For 48 markers, with a minimum of 4 markers positive and a 2% FP rate, overall sensitivity improves from 84.9% to 95.8%, when the average individual marker sensitivity improves from 50% to 66%, for detecting Stage I cancer (at about 150 molecules of each positive marker in the blood, see FIGS. 22A and 34A). If the individual marker FP rate is 2%, then if there is a 4-marker minimum, then overall FP rate is 3.1% for 48 markers, for a specificity of 96.9% (See FIG. 22B or 34B). However, if the individual marker FP rate is 3%, then the assay requires a 5-marker minimum, then overall FP rate is 4.2% for 48 markers, for a specificity of 95.8% (See FIG. 22B). At 5 markers, for Stage I cancer (at about 150 molecules of each positive marker in the blood), overall sensitivity improves from 71.6% to 90.0%, when the average individual marker sensitivity improves from 50% to 66% (See FIG. 22A and FIG. 34A).

[0275] From the above charts, the receiver operating characteristic (ROC) curves may be calculated by plotting Sensitivity vs. 1-Specificity. Since these are theoretical calculations, the curves were generated for different levels of average marker false-positive rates of 2%, 3%, 4%, and 5%. The AUC values, calculated for ROC curves for 24 markers, with average individual marker at 66% Sensitivity with 2%-3% FP; 36 markers, with average individual marker at 66% Sensitivity with 2%-3% FP; and 48 markers, with average individual marker at 66% Sensitivity with 2%-3% FP; are provided in Table 23 below. Using the benchmark of an average of 150 molecules in the blood for the earliest cancer (Stage I), and looking only at the 3% individual marker FP rate AUC values are at 77% with 24 markers (average individual marker at 50% Sensitivity), improve to 87% with 24 markers (average individual marker at 66% Sensitivity); AUC values are at 87% with 36 markers (average individual marker at 50% Sensitivity), improve to 95% with 36 markers (average individual marker at 66% Sensitivity); and AUC values are at 89% with 48 markers (average individual marker at 50% Sensitivity), improve to 97% with 48 markers (average individual marker at 66% Sensitivity). These results illustrate that for multiple marker assays achieving good sensitivities and specificities for the earliest cancers is aided when the average individual marker sensitivity improves from 50% to 66%.

TABLE 23
24, 36, & 48 Marker AUC Values from ROC Curves; Avg. Indiv. Mkr,: 66% Sensitivity

| Total | | | | | | | |
|---|---|---|---|---|---|---|---|
| Markers: | | | | | | | |
| Individual | | | | | | | |
| marker FP | 150 | 200 | 240 | 300 | 400 | 480 | 600 |
| rate | Molecules | Molecules | Molecules | Molecules | Molecules | Molecules | Molecules |
| 24 Mkrs: 2% | 88% | 95% | 98% | >99% | >99% | >99% | >99% |
| 24 Mkrs: 3% | 87% | 94% | 97% | 99% | >99% | >99% | >99% |
| 36 Mkrs: 2% | 96% | 99% | >99% | >99% | >99% | >99% | >99% |
| 36 Mkrs: 3% | 95% | 99% | >99% | >99% | >99% | >99% | >99% |
| 48 Mkrs: 2% | 98% | >99% | >99% | >99% | >99% | >99% | >99% |
| 48 Mkrs: 3% | 97% | 99% | >99% | >99% | >99% | >99% | >99% |

[0276] How would increasing the average individual marker sensitivity from 50% sensitivity to 66% sensitivity improve upon a one-step cancer assay? To review: the challenge is to screen 107 million adults in the U.S. over the age of 50 for colorectal cancer—of which there are about 135,000 new cases that are diagnosed a year. In this example, if there is an average of 300 molecules in the blood for early cancer (Stage I & II), and taking the best-case scenario of individual marker FP rate is 2%, then if there is a 3-marker minimum, then overall FP rate is 1.6% for 24 markers, for a specificity of 98.4% (See FIG. 20B or 32B). At 3 markers, for Stage I & II cancer (at about 300 molecules of each positive marker in the blood), for average marker sensitivity of 50%, the test would miss 6.2%; i.e. for Stage I & II cancer the overall sensitivity would be 93.8% (See FIG. 20A), e.g. the test would correctly identify 93.8% of individuals with disease, which would be 126,630 individuals (out of 135,000 new cases). At a specificity of 98.4%, for 107 million individuals screened, the test would also generate 1.6%×107,000,000=1,712,000 false positives. Thus, the positive predictive value would be 126,630/(126,630+1,712,000)=around 6.8%, in other words, only one in 14 individuals who tested positive would actually have colorectal cancer, the rest would be false-positives. At 3 markers, for Stage I & II cancer (at about 300 molecules of each positive marker in the blood), for average marker sensitivity of 66%, the test would miss 1.4%; i.e. for Stage I & II cancer the overall sensitivity would be 98.6% (See FIG. 32A), e.g. the test would correctly identify 98.6% of individuals with disease, which would be 133,110 individuals (out of 135,000 new cases). At a specificity of 98.4%, for 107 million individuals screened, the test would also generate 1.6%×107,000,000=1,712,000 false positives. Thus, the positive predictive value would be 133,110/(133,110+1,712,000)=around 7.2%, in other words, only one in 14 individuals who tested positive would actually have colorectal cancer, the rest would be false-positives. Thus, if the FP is low, i.e. 2%, then there is marginal benefit in going from an average marker sensitivity of 50% to an average marker sensitivity of 66%.

[0277] However, if the individual marker FP rate is more realistic, say 4%, then more markers will be required to achieve better than 98% specificity, and this will be at the cost of sensitivity. If individual marker FP rate is 4%, then if there is a 5-marker minimum, then overall FP rate is 0.4% for 24 markers, for a specificity of 99.6% (See FIG. 20B). At 5 markers, for Stage I & II cancer (at about 300 molecules of each positive marker in the blood), at an average marker sensitivity of 50%, the test would miss 28.5%; i.e. for Stage I & II cancer the overall sensitivity would be 71.5% (See FIG. 20A), e.g. the test would correctly identify 71.5% of individuals with disease, which would be 90,540 individuals (out of 135,000 new cases). At a specificity of 99.6%, for 107 million individuals screened, the test would also generate 0.4%×107,000,000=428,000 false positives. Thus, the positive predictive value would be 90,540/(90,540+428,000)=around 17.5%, in other words, one in 5.7 individuals who tested positive would actually have colorectal cancer, the rest would be false-positives. A PPV of 17.5% is quite respectable, however, it would be achieved at the cost of missing 28.5% of early cancer. At 3 markers, for Stage I & II cancer (at about 300 molecules of each positive marker in the blood), for average marker sensitivity of 66%, the test would miss 10.0%; i.e. for Stage I & II cancer the overall sensitivity would be 90.0% (See FIG. 32A), e.g. the test would correctly identify 90.0% of individuals with disease, which would be 121,500 individuals (out of 135,000 new cases). At a specificity of 99.6%, for 107 million individuals screened, the test would also generate 0.4%×107,000,000=428,000 false positives. Thus, the positive predictive value would be 121,500/(121,500+428,000)=around 22.1%, in other words, one in 4.5 individuals who tested positive would actually have colorectal cancer, the rest would be false-positives. A PPV of 22.1% is excellent, and further, it would be achieved at the cost of missing only 10% of early cancer. Thus, if the FP is more realistic i.e. 4%, then there is a significant benefit in going from an average marker sensitivity of 50% to an average marker sensitivity of 66%.

[0278] Returning to the example of colorectal cancer, in particular the cases of microsatellite stable tumors (MSS) where the mutation load is low, for these calculations when relying on NGS sequencing alone (assuming 150 molecules with one mutation in the blood), an estimated 78% of early colorectal cancer would be missed. Again, to put these number in perspective, in the U.S., about 135,000 new cases of colorectal cancer were diagnosed in 2018, of which about 60% is late cancer (i.e. Stage III & IV). About 107 million individuals in the U.S. are over the age of 50 and should be tested for colorectal cancer. While it cannot be predicted how many individuals have a hidden cancer (i.e. Stage I) within them, who are non-compliant to testing, for the purposes of this calculation, assume that the average late cancer was once the average early cancer, and thus individuals with Stage I cancer would be about 40,500 individuals. With the assumption of these samples containing at least 150 molecules with one mutation in the blood, such a test would find 8,910 individuals (out of 40,500 individuals with Stage I cancer) with colorectal cancer. However, with a specificity for sequencing at 98%, there would be about 2.1 million false-positives. The positive predictive value of such a test would be around 0.4%, in other words, only one in 236 individuals who tested positive would actually have Stage I colorectal cancer, the rest would be false-positives. In contrast, consider the two-step methylation marker test described above, wherein the first step has 24 methylation markers specific to GI cancers, while the second step has 48 methylation markers specific to colorectal cancer. In this example, the average individual marker sensitivity is set at 66%. In this example, as above, the calculations are done with the anticipation of an average of 150 methylated (or hydroxymethylated) molecules per positive marker in the blood. Assuming individual marker false-positive rates of 3%, and with the first step requiring a minimum of 3 markers positive, then with an overall specificity of 94.6%, the first step would identify 5,778,000 individuals (out of 107,000,000 total adults over 50 in the U.S.) which would include at 76.2% sensitivity or about 30,861 individuals with Stage I colorectal cancer (out of 40,500 individuals with Stage I cancer). However, those 5,778,000 presumptive positive individuals would be evaluated in the second step of 48 markers requiring a minimum of 5 markers positive, then the two-step test would identify 76.2%×90.0%=68.6%=27,775 individuals (out of 40,500 individuals with Stage I cancer) with colorectal cancer. With a specificity of 95.8%, the second test would also generate 5,778,000×4.2%=242,676 false-positives. The positive predictive value of such a test would be 27,775/270,451=10.3%, in other words, 1 in 10 individuals who tested positive would actually have Stage I colorectal cancer, an extraordinarily successful screen to focus on those patients who would most benefit from follow-up colonoscopy. Since >90% of individuals identified with Stage I colon cancer have long-term survival after just surgery, the benefit in lives saved would be of incalculable value.

[0279] How would the above numbers change if the initial test in the two-step assay uses 36 markers? In this example, as above, the calculations are done with the anticipation of an average of 150 methylated (or hydroxymethylated) molecules per positive marker in the blood. Assuming individual marker false-positive rates of 3%, and with the first step requiring a minimum of 4 markers positive, then with an overall specificity of 95.2%, the first step would identify 5,136,000 individuals (out of 107,000,000 total adults over 50 in the U.S.) which would include at 84.9% sensitivity or about 34,385 individuals with Stage I colorectal cancer (out of 40,500 individuals with Stage I cancer). However, those 5,136,000 presumptive positive individuals would be evaluated in the second step of 48 markers requiring a minimum of 5 markers positive, then the two-step test would identify 84.9%×90.0%=76.4%=30,946 individuals (out of 40,500 individuals with Stage I cancer) with colorectal cancer. With a specificity of 95.8%, the second test would also generate 5,136,000×4.2%=215,712 false-positives. The positive predictive value of such a test would be 30,946/246,658=12.5%, in other words, 1 in 8 individuals who tested positive would actually have Stage I colorectal cancer. In reality, one would need to also include the success for identifying Stage 2 and higher cancers. In expanding this example, the calculations are done with the anticipation that Stage I CRC has an average of 150 methylated (or hydroxymethylated) molecules per positive marker in the blood, Stage II CRC has an average of 200 methylated molecules per positive marker, and the higher stages (III & IV) have at least an average of 300 methylated molecules per positive marker, and the higher stages. Also, to be consistent with the idea that as the test is used repeatedly, more of early and less of late CRC will be detected, then an estimate of 40,500 individuals with Stage I cancer, 40,500 individuals with Stage II cancer, and the remaining 54,000 individuals have late-stage cancer=135,000 total individuals with colorectal cancer identified per year in the U.S. The above calculation already provided the false-positive rate for the early cancer. For Stage II cancer, 95.8% would be identified in the first step, of which 95.8%×98.0%=93.9%=38,023 individuals with Stage II cancer would be verified in the second step. For Stage III and IV cancer, 99.8% would be identified in the first step, of which 99.8%×(100%)=53,892 individuals with late cancer would be identified. This brings the total identified at 30,946+38,023+53,892=122,861 individuals out of 135,000 with colorectal cancer. Overall, the positive predictive value of such a test would be 122,861/369,519=33.2%, in other words, 1 in 3 individuals who tested positive would actually have colorectal cancer, and this test would identify 68,969/81,000 or 85% of those individuals with early cancer—which would be unprecedented in diagnostic approaches to detect early cancer.

[0280] What if the goal is to minimize the total number of markers in an initial high-throughput cancer screen? What if the average sensitivity of individual markers was increased from 66% to 75%? FIGS. 35 through 40 illustrate results for calculated overall Sensitivity and Specificity for 12, 18, 24, 32, 36, and 48 markers, respectively. These graphs are based on the assumption that the average individual marker sensitivity is 75%, and the average individual marker false-positive rate is from 2% to 5%. The sensitivity curves provide overall sensitivity as a function of the average number of molecules in the blood for each marker, with separate curves for each minimum number of markers needed to call a sample as positive. The specificity curves provide overall specificity as a function of individual marker false-positive rates, again with separate curves for each minimum number of markers needed to call a sample as positive. The calculated numbers for overall Sensitivity and Specificity for 12, 18, 24, 32, 36, and 48 markers, respectively, where the average individual marker sensitivity is 75% are provided in the tables below.

TABLE 24
12 Markers Sensitivity
Avg. Indiv. Mkr,: 75% Sensitivity

| Average | | | | |
|---|---|---|---|---|
| Number of | | Minimum | Minimum | Minimum |
| Molecules | Mutation, | 2 Markers | 3 Markers | 4 Markers |
| in Blood | 1 Positive | Positive | Positive | Positive |
| 150 | 22.1% | 65.8% | 39.1% | 19.1% |
| 200 | 28.1% | 80.1% | 57.7% | 35.3% |
| 240 | 33.0% | 87.4% | 69.7% | 48.5% |
| 300 | 39.4% | 93.9% | 82.6% | 65.8% |
| 400 | 48.8% | 98.3% | 93.8% | 84.9% |
| 480 | 55.1% | 99.4% | 97.5% | 92.8% |
| 600 | 63.2% | 99.9% | 99.4% | 97.9% |

TABLE 25
12 Marker Specificity

| Individual | Minimum | Minimum | Minimum |
|---|---|---|---|
| marker FP | 2 Markers | 3 Markers | 4 Markers |
| rate | Positive | Positive | Positive |
| 2% | 97.4% | 99.8% | 100.0% |
| 3% | 94.1% | 99.4% | 100.0% |
| 4% | 89.4% | 98.6% | 99.9% |
| 5% | 83.5% | 97.3% | 99.7% |

TABLE 26
18 Marker Sensitivity
Avg. Indiv. Mkr,: 75% Sensitivity

| Average | | | | | |
|---|---|---|---|---|---|
| Number of | | Minimum | Minimum | Minimum | Minimum |
| Molecules | Mutation, | 2 Markers | 3 Markers | 4 Markers | 5 Markers |
| in Blood | 1 Positive | Positive | Positive | Positive | Positive |
| 150 | 22.1% | 85.0% | 65.5% | 43.6% | 25.1% |
| 200 | 28.1% | 93.9% | 82.6% | 65.8% | 46.8% |
| 240 | 33.0% | 97.1% | 90.5% | 78.7% | 62.7% |
| 300 | 39.4% | 99.1% | 96.4% | 90.4% | 80.3% |
| 400 | 48.8% | 99.9% | 99.4% | 97.9% | 94.5% |
| 480 | 55.1% | 99.9% | 99.9% | 99.4% | 98.3% |
| 600 | 63.2% | 99.9% | 99.9% | 99.9% | 99.7% |

TABLE 27
18 Marker Specificity

| Individual | Minimum | Minimum | Minimum | Minimum |
|---|---|---|---|---|
| marker FP | 2 Markers | 3 Markers | 4 Markers | 5 Markers |
| rate | Positive | Positive | Positive | Positive |
| 2% | 93.9% | 99.3% | 100.0% | 100.0% |
| 3% | 86.2% | 97.8% | 99.8% | 100.0% |
| 4% | 75.5% | 94.8% | 99.2% | 99.9% |
| 5% | 61.8% | 89.8% | 98.1% | 99.7% |

TABLE 28
24 Marker Sensitivity
Avg. Indiv. Mkr,: 75% Sensitivity

| Average | | | | | |
|---|---|---|---|---|---|
| Number of | | Minimum | Minimum | Minimum | Minimum |
| Molecules | Mutation, | 3 Markers | 4 Markers | 5 Markers | 6 Markers |
| in Blood | 1 Positive | Positive | Positive | Positive | Positive |
| 150 | 22.1% | 82.6% | 65.8% | 46.8% | 29.7% |
| 200 | 28.1% | 93.8% | 84.9% | 71.5% | 55.4% |
| 240 | 33.0% | 97.5% | 92.8% | 84.4% | 72.4% |
| 300 | 39.4% | 99.4% | 97.9% | 94.5% | 88.4% |
| 400 | 48.8% | 99.9% | 99.8% | 99.2% | 98.0% |
| 480 | 55.1% | 99.9% | 99.9% | 99.9% | 99.6% |
| 600 | 63.2% | 99.9% | 99.9% | 99.9% | 99.9% |

TABLE 29
24 Marker Specificity

| Individual | Minimum | Minimum | Minimum | Minimum |
|---|---|---|---|---|
| marker FP | 2 Markers | 3 Markers | 4 Markers | 5 Markers |
| rate | Positive | Positive | Positive | Positive |
| 2% | 89.0% | 98.4% | 99.8% | 100.0% |
| 3% | 75.2% | 94.5% | 99.1% | 99.9% |
| 4% | 55.8% | 87.0% | 97.3% | 99.6% |
| 5% | 31.0% | 74.7% | 93.4% | 98.7% |

TABLE 30
32 Marker Sensitivity Avg. Indiv. Mkr,: 75% Sensitivity

| Average | | | | | | | |
|---|---|---|---|---|---|---|---|
| Number of | | Minimum | Minimum | Minimum | Minimum | Minimum | Minimum |
| Molecules | Mutation, | 3 Markers | 4 Markers | 5 Markers | 6 Markers | 7 Markers | 8 Markers |
| in Blood | 1 Positive | Positive | Positive | Positive | Positive | Positive | Positive |
| 150 | 22.1% | 93.8% | 84.9% | 71.5% | 55.4% | 39.4% | 25.6% |
| 200 | 28.1% | 98.6% | 95.8% | 90.0% | 80.9% | 68.7% | 54.7% |
| 240 | 33.0% | 99.6% | 98.6% | 96.2% | 91.6% | 84.3% | 74.2% |
| 300 | 39.4% | 99.9% | 99.8% | 99.2% | 98.0% | 95.4% | 91.0% |
| 400 | 48.8% | 99.9% | 99.9% | 99.9% | 99.9% | 99.6% | 99.0% |
| 480 | 55.1% | 99.9% | 99.9% | 99.9% | 99.9% | 99.9% | 99.9% |
| 600 | 63.2% | 99.9% | 99.9% | 99.9% | 99.9% | 99.9% | 99.9% |

TABLE 31
32 Marker Specificity

| Individual | Minimum | Minimum | Minimum | Minimum | Minimum | Minimum |
|---|---|---|---|---|---|---|
| marker FP | 3 Markers | 4 Markers | 5 Markers | 6 Markers | 7 Markers | 8 Markers |
| rate | Positive | Positive | Positive | Positive | Positive | Positive |
| 2% | 96.0% | 99.4% | 99.9% | 100.0% | 100.0% | 100.0% |
| 3% | 86.6% | 97.1% | 99.5% | 99.9% | 100.0% | 100.0% |
| 4% | 68.3% | 90.8% | 97.9% | 99.6% | 99.9% | 100.0% |
| 5% | 38.0% | 77.5% | 93.7% | 98.6% | 99.7% | 100.0% |

TABLE 32
36 Marker Sensitivity Avg. Indiv. Mkr,: 75% Sensitivity

| Average | | | | | | | |
|---|---|---|---|---|---|---|---|
| Number of | | Minimum | Minimum | Minimum | Minimum | Minimum | Minimum |
| Molecules | Mutation, | 3 Markers | 4 Markers | 5 Markers | 6 Markers | 7 Markers | 8 Markers |
| in Blood | 1 Positive | Positive | Positive | Positive | Positive | Positive | Positive |
| 150 | 22.1% | 96.4% | 90.4% | 80.3% | 66.6% | 51.2% | 36.4% |
| 200 | 28.1% | 99.4% | 97.9% | 94.5% | 88.4% | 79.3% | 67.6% |
| 240 | 33.0% | 99.9% | 99.4% | 98.3% | 95.8% | 91.3% | 84.3% |
| 300 | 39.4% | 99.9% | 99.9% | 99.7% | 99.2% | 98.1% | 95.9% |
| 400 | 48.8% | 99.9% | 99.9% | 99.9% | 99.9% | 99.9% | 99.7% |
| 480 | 55.1% | 99.9% | 99.9% | 99.9% | 99.9% | 99.9% | 99.9% |
| 600 | 63.2% | 99.9% | 99.9% | 99.9% | 99.9% | 99.9% | 99.9% |

TABLE 33
36 Marker Specificity

| Individual | Minimum | Minimum | Minimum | Minimum | Minimum | Minimum |
|---|---|---|---|---|---|---|
| marker FP | 3 Markers | 4 Markers | 5 Markers | 6 Markers | 7 Markers | 8 Markers |
| rate | Positive | Positive | Positive | Positive | Positive | Positive |
| 2% | 94.3% | 99.1% | 99.9% | 100.0% | 100.0% | 100.0% |
| 3% | 80.7% | 95.2% | 99.1% | 99.9% | 100.0% | 100.0% |
| 4% | 54.3% | 84.9% | 96.1% | 99.2% | 99.9% | 100.0% |
| 5% | 10.8% | 63.2% | 88.2% | 97.0% | 99.3% | 99.9% |

TABLE 34
48 Marker Sensitivity Avg. Indiv. Mkr,: 75% Sensitivity

| Average | | | | | | | | |
|---|---|---|---|---|---|---|---|---|
| Number of | | Minimum | Minimum | Minimum | Minimum | Minimum | Minimum | Minimum |
| Molecules | Mutation, | 4 Markers | 5 Markers | 6 Markers | 7 Markers | 8 Markers | 9 Markers | 10 Markers |
| in Blood | 1 Positive | Positive | Positive | Positive | Positive | Positive | Positive | Positive |
| 150 | 22.1% | 97.9% | 94.5% | 88.4% | 79.3% | 67.6% | 54.4% | 41.3% |
| 200 | 28.1% | 99.8% | 99.2% | 98.0% | 95.4% | 91.0% | 84.5% | 75.8% |
| 240 | 33.0% | 99.9% | 99.9% | 99.6% | 98.9% | 97.5% | 94.9% | 90.8% |
| 300 | 39.4% | 99.9% | 99.9% | 99.9% | 99.9% | 99.7% | 99.3% | 98.5% |
| 400 | 48.8% | 99.9% | 99.9% | 99.9% | 99.9% | 99.9% | 99.9% | 99.9% |
| 480 | 55.1% | 99.9% | 99.9% | 99.9% | 99.9% | 99.9% | 99.9% | 99.9% |
| 600 | 63.2% | 99.9% | 99.9% | 99.9% | 99.9% | 99.9% | 99.9% | 99.9% |

TABLE 35
48 Marker Specificity

| Individual | Minimum | Minimum | Minimum | Minimum | Minimum | Minimum | Minimum |
|---|---|---|---|---|---|---|---|
| marker FP | 4 Markers | 5 Markers | 6 Markers | 7 Markers | 8 Markers | 9 Markers | 10 Markers |
| rate | Positive | Positive | Positive | Positive | Positive | Positive | Positive |
| 2% | 96.9% | 99.5% | 99.9% | 100.0% | 100.0% | 100.0% | 100.0% |
| 3% | 84.2% | 95.8% | 99.1% | 99.8% | 100.0% | 100.0% | 100.0% |
| 4% | 50.2% | 82.5% | 95.0% | 98.8% | 99.8% | 100.0% | 100.0% |
| 5% | | 46.5% | 80.8% | 94.2% | 98.5% | 99.7% | 99.9% |

[0281] How would increasing the average individual marker sensitivity from 50% sensitivity to 75% sensitivity improve upon a one-step cancer assay? To review: the challenge is to screen 107 million adults in the U.S. over the age of 50 for colorectal cancer—of which there are about 135,000 new cases that are diagnosed a year. In this example, if there is an average of 300 molecules in the blood for early cancer (Stage I & II), and taking the best-case scenario of individual marker FP rate is 2%, then if there is a 3-marker minimum, then overall FP rate is 1.6% for 24 markers, for a specificity of 98.4% (See FIG. 20B or 32B). At 3 markers, for Stage I & II cancer (at about 300 molecules of each positive marker in the blood), for average marker sensitivity of 50%, the test would miss 6.2%; i.e. for Stage I & II cancer the overall sensitivity would be 93.8% (See FIG. 20A), e.g. the test would correctly identify 93.8% of individuals with disease, which would be 126,630 individuals (out of 135,000 new cases). At a specificity of 98.4%, for 107 million individuals screened, the test would also generate 1.6%×107,000,000=1,712,000 false positives. Thus, the positive predictive value would be 126,630/(126,630+1,712,000)=around 6.8%. In other words, only one in 14 individuals who tested positive would actually have colorectal cancer, and the rest would be false-positives. At 3 markers, for Stage I & II cancer (at about 300 molecules of each positive marker in the blood), with only 18 markers with an average marker sensitivity of 75%, the test would miss 3.6%; i.e. for Stage I & II cancer the overall sensitivity would be 96.4% (See FIG. 36A), e.g. the test would correctly identify 96.4% of individuals with disease, which would be 130,140 individuals (out of 135,000 new cases). At a specificity of 99.3%, for 107 million individuals screened, the test would also generate 0.7%×107,000,000=749,000 false positives. Thus, the positive predictive value would be 130,140/(130,140+749,000)=around 14.8%. In other words, only one in 6.7 individuals who tested positive would actually have colorectal cancer, and the rest would be false-positives. Thus, if the FP is low, i.e. 2%, then there is some benefit in going from an average marker sensitivity of 50% to an average marker sensitivity of 75%.

[0282] However, if the individual marker FP rate is more realistic, e.g., 4%, then more markers will be required to achieve better than 98% specificity, and this will be at the cost of sensitivity. If individual marker FP rate is 4%, then, if there is a 5-marker minimum, the overall FP rate is 0.4% for 24 markers, for a specificity of 99.6% (See FIG. 20B). At 5 markers, for Stage I & II cancer (at about 300 molecules of each positive marker in the blood), at an average marker sensitivity of 50%, the test would miss 28.5%; i.e. for Stage I & II cancer the overall sensitivity would be 71.5% (See FIG. 20A), e.g. the test would correctly identify 71.5% of individuals with disease, which would be 90,540 individuals (out of 135,000 new cases). At a specificity of 99.6%, for 107 million individuals screened, the test would also generate 0.4%×107,000,000=428,000 false positives. Thus, the positive predictive value would be 90,540/(90,540+428,000)=around 17.5%. In other words, one in 5.7 individuals who tested positive would actually have colorectal cancer, and the rest would be false-positives. A PPV of 17.5% is quite respectable, however, it would be achieved at the cost of missing 28.5% of early cancer. At 4 markers, for Stage I & II cancer (at about 300 molecules of each positive marker in the blood), for an 18 marker panel with average marker sensitivity of 75%, the test would miss 9.6%; i.e. for Stage I & II cancer the overall sensitivity would be 90.4% (See FIG. 36A), e.g. the test would correctly identify 90.4% of individuals with disease, which would be 122,040 individuals (out of 135,000 new cases). At a specificity of 99.2%, for 107 million individuals screened, the test would also generate 0.8%×107,000,000=856,000 false positives. Thus, the positive predictive value would be 122,040/(122,040+856,000)=around 12.5%. In other words, one in 8 individuals who tested positive would actually have colorectal cancer, and the rest would be false-positives. A PPV of 12.5% is not bad, and further, it would be achieved at the cost of missing only 10% of early cancer. Thus, if the FP is more realistic, i.e. 4%, then there is a significant benefit in going from an average marker sensitivity of 50% to an average marker sensitivity of 75%.

[0283] Returning to the example of colorectal cancer, in particular the cases of microsatellite stable tumors (MSS) where the mutation load is low, for these calculations when relying on NGS sequencing alone (assuming 150 molecules with one mutation in the blood), an estimated 78% of early colorectal cancer would be missed. Again, to put these number in perspective, in the U.S., about 135,000 new cases of colorectal cancer were diagnosed in 2018, of which about 60% is late cancer (i.e. Stage III & IV). About 107 million individuals in the U.S. are over the age of 50 and should be tested for colorectal cancer. While it cannot be predicted how many individuals have a hidden cancer (i.e. Stage I) within them, who are non-compliant to testing, for the purposes of this calculation, assume that the average late cancer was once the average early cancer, and thus individuals with Stage I cancer would be about 40,500 individuals. With the assumption of these samples containing at least 150 molecules with one mutation in the blood, such a test would find 8,910 individuals (out of 40,500 individuals with Stage I cancer) with colorectal cancer. However, with a specificity for sequencing at 98%, there would be about 2.1 million false-positives. The positive predictive value of such a test would be around 0.4%, in other words, only one in 236 individuals who tested positive would actually have Stage I colorectal cancer, the rest would be false-positives. In contrast, consider a two-step methylation marker test, wherein the first step has 18 methylation markers specific to GI cancers with average sensitivity of 75%, while the second step has 36 methylation markers specific to colorectal cancer with average sensitivity of 75% (See FIG. 1D). In this example, as above, the calculations are done with the anticipation of an average of 150 methylated (or hydroxymethylated) molecules per positive marker in the blood. Assuming individual marker false-positive rates of 3%, and the first step requiring a minimum of 3 markers positive, then with an overall specificity of 97.8%, the first step would identify 2,354,000 individuals (out of 107,000,000 total adults over 50 in the U.S.). This would include, at 65.5% sensitivity, about 26,527 individuals with Stage I colorectal cancer (out of 40,500 individuals with Stage I cancer). However, those 2,354,000 presumptive positive individuals would be evaluated in the second step of 36 markers requiring a minimum of 5 markers positive. The two-step test would identify 65.5%×80.3%=52.6%=21,302 individuals (out of 40,500 individuals with Stage I cancer) with colorectal cancer. With a specificity of 99.1%, the second test would also generate 2,354,000×0.9%=21,186 false-positives. The positive predictive value of such a test would be 21,302/(21,302+21,186)=50.1%. In other words, 1 in 2 individuals who tested positive would actually have Stage I colorectal cancer, an extraordinarily successful screen to focus on those patients who would most benefit from follow-up colonoscopy. Since >90% of individuals identified with Stage I colon cancer have long-term survival after just surgery, the benefit in lives saved would be of incalculable value.

[0284] The ultimate goal is to develop a high-throughput scalable test to detect the majority of cancers that occur worldwide. A list for incidence of cancers worldwide may be found at: https://www.wcrf.org/dietandcancer/cancer-trends/worldwide-cancer-data. The solid tumor cancers have been grouped into the following subclasses, as listed below in Tables 36, 37, and 38 for both sexes, for men, and for women.

TABLE 36
Global cancer incidence; Both Sexes
(Numbers in thousands; most common cancers
have incidence above 100,000 per year)

| | Incidence | % Group | % total All | (Total) |
|---|---|---|---|---|
| Group 1: | | | | |
| Colorectal (1,801) | 1801 | 52.9% | 12.9% | 13981 |
| Stomach (1,033) | 1033 | 30.3% | 7.4% | 13981 |
| Esophagus (572) | 572 | 16.8% | 4.1% | 13981 |
| Total, Group 1: | 3406 | | | |
| Group 2: | | | | |
| Breast (2,089) | 2089 | 62.6% | 14.9% | 13981 |
| Endometrial & Cervical (570) | 570 | 17.1% | 4.1% | 13981 |
| Uterine (382) | 382 | 11.5% | 2.7% | 13981 |
| Ovarian (295) | 295 | 8.8% | 2.1% | 13981 |
| Total, Group 2: | 3336 | | | |
| Group 3: | | | | |
| Lung (2,093) | 2093 | 59.9% | 15.0% | 13981 |
| Head & Neck (832) | 832 | 23.8% | 6.0% | 13981 |
| Thyroid (567) | 567 | 16.2% | 4.1% | 13981 |
| Total, Group 3: | 3492 | | | |
| Group 4: | | | | |
| Prostate (1,276) | 1276 | 57.3% | 9.1% | 13981 |
| Bladder (549) | 549 | 24.6% | 3.9% | 13981 |
| Kidney (403) | 403 | 18.1% | 2.9% | 13981 |
| Total, Group 4: | 2228 | | | |
| Group 5: | | | | |
| Liver (841) | 841 | 55.4% | 6.0% | 13981 |
| Pancreas (459) | 459 | 30.2% | 3.3% | 13981 |
| Gallbladder (219) | 219 | 14.4% | 1.6% | 13981 |
| Total, Group 5: | 1519 | | | |
| Total | 13981 | | | |

TABLE 37
Global cancer incidence; Male
(Numbers in thousands; most common cancers
have incidence above 100,000 per year)

| | Incidence | % Group | % total All | (Total) |
|---|---|---|---|---|
| Group 1: | | | | |
| Colorectal (1,801) | 1006 | 48.2% | 14.1% | 7114 |
| Stomach (1,033) | 683 | 32.7% | 9.6% | 7114 |
| Esophagus (572) | 400 | 19.1% | 5.6% | 7114 |
| Total, Group 1: | 2089 | | | |
| Group 2: | | | | |
| Breast (2,089) | | | | |
| Endometrial & Cervical (570) | | | | |
| Uterine (382) | | | | |
| Ovarian (295) | | | | |
| Total, Group 2: | | | | |
| Group 3: | | | | |
| Lung (2,093) | 1368 | 64.1% | 19.2% | 7114 |
| Head & Neck (832) | 635 | 29.8% | 8.9% | 7114 |
| Thyroid (567) | 131 | 6.1% | 1.8% | 7114 |
| Total, Group 3: | 2134 | | | |
| Group 4: | | | | |
| Prostate (1,276) | 1276 | 65.3% | 17.9% | 7114 |
| Bladder (549) | 424 | 21.7% | 6.0% | 7114 |
| Kidney (403) | 254 | 13.0% | 3.6% | 7114 |
| Total, Group 4: | 1954 | | | |
| Group 5: | | | | |
| Liver (841) | 597 | 63.7% | 8.4% | 7114 |
| Pancreas (459) | 243 | 25.9% | 3.4% | 7114 |
| Gallbladder (219) | 97 | 10.4% | 1.4% | 7114 |
| Total, Group 5: | 937 | | | |
| Total | 7114 | | | |

TABLE 38
Global cancer incidence; Female
(Numbers in thousands; most common cancers
have incidence above 100,000 per year)

| | Incidence | % Group | % total All | (Total) |
|---|---|---|---|---|
| Group 1: | | | | |
| Colorectal (1,801) | 795 | 60.4% | 11.5% | 6930 |
| Stomach (1,033) | 350 | 26.6% | 5.1% | 6930 |
| Esophagus (572) | 172 | 13.1% | 2.5% | 6930 |
| Total, Group 1: | 1317 | | | |
| Group 2: | | | | |
| Breast (2,089) | 2089 | 62.6% | 30.1% | 6930 |
| Endometrial & Cervical (570) | 570 | 17.1% | 8.2% | 6930 |
| Uterine (382) | 382 | 11.5% | 5.5% | 6930 |
| Ovarian (295) | 295 | 8.8% | 4.3% | 6930 |
| Total, Group 2: | 3336 | | | |
| Group 3: | | | | |
| Lung (2,093) | 725 | 53.4% | 10.5% | 6930 |
| Head & Neck (832) | 196 | 14.4% | 2.8% | 6930 |
| Thyroid (567) | 436 | 32.1% | 6.3% | 6930 |
| Total, Group 3: | 1357 | | | |
| Group 4: | | | | |
| Prostate (1,276) | 0 | 0.0% | 0.0% | 6930 |
| Bladder (549) | 216 | 63.9% | 3.1% | 6930 |
| Kidney (403) | 122 | 36.1% | 1.8% | 6930 |
| Total, Group 4: | 338 | | | |
| Group 5: | | | | |
| Liver (841) | 244 | 41.9% | 3.5% | 6930 |
| Pancreas (459) | 216 | 37.1% | 3.1% | 6930 |
| Gallbladder (219) | 122 | 21.0% | 1.8% | 6930 |
| Total, Group 5: | 582 | | | |
| Total | 6930 | | | |

[0285] The above list does not include liquid cancers, nor some of the less common solid tumors. Worldwide incidence (numbers in thousands) of liquid tumors include Non-Hodgkin lymphoma (225), Leukemia (187), Multiple Myeloma (70), and Hodgkin lymphoma (33). These would be detected in a separate test not discussed herein. Further, the list excludes Melanoma (287) and Brain tumors (134). Testing for these would be done with separate sets of markers, optimized as described above for colorectal cancer. In addition, while some cancers listed in the tables above are of extreme medical importance (Mesothelioma, Thyroid, the three different subcategories of Kidney cancer), their biology is sufficiently different as to usually merit a separate set of markers, again, optimized as described above for colorectal cancer.

[0286] Thus, for the present application, a Pan-Oncology test is developed that includes the following major cancers by the following groupings: Group 1 (colorectal, stomach, and esophagus); Group 2 (breast, endometrial, ovarian, cervical, and uterine); Group 3 (lung and head & neck); Group 4 (prostate and bladder); and Group 5 (liver, pancreatic, or gall bladder). Note that some cancers within Group 3 may be tested as a sputum sample, and cancers in Group 4 may be tested as a urine sample.

[0287] Careful analysis of the TCGA methylation database revealed a general commonality in methylation patterns among cancers within these 5 separate groups. Further, there are some methylation markers that are common among several cancers, while absent in normal white blood cells. Three different strategies were used to design a multi-step pan-oncology test.

[0288] The first strategy is to identify markers that cover multiple cancers in one or more of the above groups. The markers should be sufficiently diverse as to cover cancers in all 5 groups. For example, a first step of the assay would use a set of 96 markers that on average comprise at least 36 markers with 50% sensitivity that covers each of the aforementioned 16 types of solid tumors (covered in the 5 Groups; see FIG. 1E; for 66% sensitivity, see FIG. 1I). If at least 5 markers are positive, the assay would then move to a second step that would be used to verify the initial results and identify the most probable tissue of origin. In most cases, more than 5 markers would be positive, and then pattern of distribution of these methylation markers would guide the choice of which groups to test in the second step. The second step of the assay would test on average 2 or more sets of the group-specific markers. For example, the second step of the assay would use 2 or more sets of 64 group-specific markers that on average comprise of at least 36 markers with 50% sensitivity that covers each of the aforementioned types of solid tumors that may be present in that group (for 66% sensitivity, see FIG. 1I). By scoring the markers that are positive and comparing to predicted positives for each cancer type within the group tested, the physician can identify the most probable tissue of origin, and subsequently send the patient to the appropriate imaging.

[0289] The second strategy is to identify markers that cover multiple cancers in one or more of the above groups. The markers should be sufficiently diverse as to cover cancers in all 5 groups. As before, a first step of the assay would use a set of 96 markers that on average comprise at least 36 markers with 50% sensitivity that covers each of the aforementioned 16 types of solid tumors (covered in the 5 Groups; see FIG. 1F; for 66% sensitivity, see FIG. 1J). If at least 5 markers are positive, the assay would then move to a second step that would be used to verify the initial results and identify the most probable tissue of origin. In most cases, more than 5 markers would be positive, and then pattern of distribution of these methylation markers would guide the choice of which groups to test in the second step. The second step of the assay would test on average 2 or more sets of the group-specific markers. For example, the second step of the assay would use 2 or more sets of 48 group-specific markers that on average comprise at least 36 markers with 75% sensitivity that covers each of the aforementioned types of solid tumors that may be present in that group. By scoring the markers that are positive and comparing to predicted positives for each cancer type within the group tested, the physician can most probably verify the group, and probably the tissue of origin, and then subsequently send the patient to the appropriate imaging.

[0290] The third strategy is to identify markers that cover as many cancers as possible, irrespective of group. The markers should be sufficiently diverse as to cover cancers in all 5 groups. For example, a first step of the assay would use a set of 48 markers that on average comprise of at least 24 markers with 75% sensitivity that covers each of the aforementioned 16 types of solid tumors (covered in the 5 Groups; see FIG. 1G). For even more sensitive detection of early cancer, the first step of the assay would use a set of 64 markers that on average comprise at least 36 markers with 75% sensitivity that covers each of the aforementioned 16 types of solid tumors (covered in the 5 Groups; see FIG. 1H). Since these markers would be broadly found in many cancers, the resultant positive markers may not point to which groups to evaluate in a second step to identify the most probable tissue of origin. One approach to do so would be to continue with the first strategy, i.e. use the 96-marker set that on average comprise of at least 36 markers with 50% sensitivity for each tumor type to determine the most probable tissue of origin (For 66% sensitivity, see FIGS. 1K & 1L). Another approach would be to use an alternative technology to identify tissue of origin, such as targeted bisulfite sequencing of 96 or more regions to determine methylation patterns and compare with predicted methylation pattern of different cancer types followed by the appropriate imaging.

[0291] Returning to the first strategy (see FIG. 1E), a close evaluation of the TCGA database reveals pan-oncology markers that meet the criteria for use in a set of 96 markers that on average comprise at least 36 markers with 50% sensitivity that covers each of the aforementioned 16 types of solid tumors. These pan-oncology markers include, but are not limited to, cancer-specific microRNA markers, cancer-specific ncRNA and IncRNA markers, cancer-specific exon transcripts, tumor-associated antigens, cancer protein markers, protein markers that can be secreted by solid tumors into the blood, common mutations, primary CpG sites that are solid tumor and tissue specific markers, chromosomal regions or sub-regions within which are primary CpG sites that are solid tumor and tissue specific markers, and primary and flanking CpG sites that are solid tumor and tissue specific markers. Methods for detecting said markers have been discussed earlier in this application, and these markers are listed below and in accompanying figures.

[0292] Blood-based, solid tumor-specific microRNA markers derived through analysis of TCGA microRNA datasets, includes, but is not limited to the following markers: (mir ID, Gene ID); hsa-mir-21, MIR21; hsa-mir-182, MIR182; hsa-mir-454, MIR454; hsa-mir-96, MIR96; hsa-mir-183, MIR183; hsa-mir-549, MIR549; hsa-mir-301a, MIR301A; hsa-mir-548f-1, MIR548F1; hsa-mir-301b, MIR301B; hsa-mir-103-1, MIR1031; hsa-mir-18^{a}, MIR18A; hsa-mir-147b, MIR147B; hsa-mir-4326, MIR4326; hsa-mir-573, MIR573. These markers may be present in exosomes, tumor-associated vesicles, Argonaute complexes, or other protected states in the blood.

[0293] FIG. 41 provides a list of blood-based, solid tumor-specific ncRNA and lncRNA markers derived through analysis of various publicly available Affymetrix Exon ST CEL data, which were aligned to GENCODE annotations to generate ncRNA and lncRNA transcriptome datasets. Comparative analyses across these datasets (various cancer types, along with normal tissues, and peripheral blood) were conducted to generate the ncRNA and IncRNA markers list. Such lncRNA and ncRNA may be enriched in exosomes or other protected states in the blood.

[0294] In addition, FIG. 42 provides a list of blood-based solid tumor-specific exon transcripts that may be enriched in exosomes, tumor-associated vesicles, or other protected states in the blood. Overexpressed oncogene transcripts, or transcripts of mutant oncogenes may be enriched in exosomes, as they may drive spread of the cancer.

[0295] FIG. 43 provides a list of cancer protein markers, identified through mRNA sequences, protein expression levels, protein product concentrations, cytokines, or autoantibody to the protein product arising from solid tumors, which may be identified in the blood, either within exosomes, other protected states, tumor-associated vesicles, or free within the plasma.

[0296] Protein markers that can be secreted by solid tumors into the blood include, but are not limited to: (Protein name, UniProt ID); Uncharacterized protein C19orf48, Q6RUI8; Protein FAM72B, Q86X60; Protein FAM72D, Q6L9T8; Hydroxyacylglutathione hydrolase-like protein, Q6PII5; Putative methyltransferase NSUN5, Q96P11; RNA pseudouridylate synthase domain-containing protein 1, Q9UJJ7; Collagen triple helix repeat-containing protein 1, Q96CG8; Interleukin-11. P20809; Stromelysin-2, P09238; Matrix metalloproteinase-9, P14780; Podocan-like protein 1, Q6PEZ8; Putative peptide YY-2, Q9NRI6; Osteopontin, P10451; Sulthydryl oxidase 2, Q6ZRP7; Glypican-2, Q8N158; Macrophage migration inhibitory factor, P14174; Peptidyl-prolyl cis-trans isomerase A, P62937; Calreticulin, P27797.

[0297] A comparative analysis was performed across various TCGA datasets (tumors, normals), followed by an additional bioinformatics filter Meinken et al., “Computational Prediction of Protein Subcellular Locations in Eukaryotes: an Experience Report,” Computational Molecular Biology 2(1):1-7 (2012), which is hereby incorporated by reference in its entirety), which predicts the likelihood that the translated protein is secreted by the cells.

[0298] Commonly found mutations in solid tumors may be used as plasma-based markers of cancer, and they are available in the COSMIC and/or TCGA datasets: TP53 (tumor protein p53), TTN (titin), MUC16 (mucin 16), KRAS (K-Ras). Initial work identifying mutations in the plasma from patients with metastatic disease revealed an average of 5 mutations not only in the patients, but also in age-matched controls. A follow-up study using a 2 Mb, 508-gene panel and sequencing to more than 60,000-fold depth, showed mutations appeared in 93.6 percent of the white blood cells from individuals without cancer and 99.1 percent of those with cancer (Razavi et al., “Cell-free DNA (cfDNA) Mutations From Clonal Hematopoiesis: Implications for Interpretation of Liquid Biopsy Tests,” Journal of Clinical Oncology 35(15):11526-11526 (2017); Razavi et al., “High-intensity Sequencing Reveals the Sources of Plasma Circulating Cell-free DNA Variants,” Nature Medicine 25(12):1928-1937 (2019), which are hereby incorporated by reference in their entirety). This phenomenon, known as age-related clonal hematopoiesis, results from accumulation of mutations in white-blood cells, that then undergo clonal expansion. When screening for mutations markers in the plasma, it is important to always sequence an aliquot of WBC DNA from the same individual, such that a presumptive positive mutation is verified as arising from internal tissue (presumably corresponding to a tumor) and not due to clonal hematopoiesis.

[0299] A deep analysis of the TCGA database of methylation markers that are absent in blood but, on average, are present in solid tumor types at 50% sensitivity, show three general categories of clusters: (i) markers that are present in colorectal cancers, and related GI cancer (stomach & esophagus), (ii) markers that are present in colorectal cancers, and related GI cancer (stomach & esophagus), as well as other tumors, and (iii) markers that are mostly absent in colorectal cancers, but present in other tumors. Second, while for some tumor types one could readily identify markers that were unique to that group, such as Group 2 (breast, endometrial, ovarian, cervical, and uterine), for other tumor types such as Lung Cancer or Pancreatic Cancer, it was difficult to identify methylation markers that were unique to that cancer. Consequently, to assemble a set of 96 markers that satisfied the criteria of at least 36 markers with 50% sensitivity that covers each of the aforementioned 16 types of solid tumors, the first 48 markers comprised about 12 markers that were strongly represented in Group 2 tumors, about 12 markers that were strongly represented in Group 3 tumors, about 12 markers that were strongly represented in Group 4 tumors, and about 12 markers that were strongly represented in Group 5 tumors. The remaining 48 markers comprised about 12 markers that were strongly represented in Groups 1 and 2 tumors, about 12 markers that were strongly represented in Groups 1 and 3 tumors, about 12 markers that were strongly represented in Groups 1 and 4 tumors, and about 12 markers that were strongly represented in Groups 1 and 5 tumors.

[0300] FIG. 44 provides a list of primary CpG sites that are solid tumors and tissue-specific markers, that may be used to identify the presence of solid tumors from cfDNA, DNA within exosomes, or DNA in other protected states (such as within CTCs) within the blood. FIG. 45 provides a list of chromosomal regions or sub-regions within which are primary CpG sites that are solid tumors and tissue-specific markers, that may be used to identify the presence of solid tumors from cfDNA, or DNA within exosomes, or DNA in other protected states (such as within CTCs) within the blood. FIG. 49 provides a list of primary and flanking CpG sites that are solid tumors and tissue-specific markers, that may be used to identify the presence of solid tumor from cfDNA, DNA within exosomes, or DNA in other protected states (such as within CTCs) within the blood. These lists contain [about 175] preferred primary CpG sites and their flanking sites, as well as [about 691] alternative markers that are low to no-CRC, and about [733 markers] alternative markers that are high is CRC, with or without being high for other cancers as well. Primer sets for [about 130] of these preferred methylation markers are listed in Table 40 in the prophetic experimental section.

[0301] Table 41 in the prophetic experimental section provides simulations of the 96-marker assay, with average sensitivities of 50%, for identifying the most probable group for tissue of origin, for both sexes. A set of 96 markers was assembled as above, and the percentage of samples positive within each of the cancer patients in the TCGA and GEO databases was assessed. The total number of patients for each cancer analyzed are: Group 1 (colorectal, CRC-PT=395; stomach, ST-Pt=260; esophagus, ES-Pt=185); Group 2 (breast, BR-Pt=668; endometrial, END-Pt=431; ovarian, OV-Pt=79; cervical, CERV-Pt=307; uterine, UTCS-Pt=57); Group 3 (lung adenocarcinoma, LUAD=450; lung squamous cell carcinoma, LUSC=372; head & neck, HNSC-Pt=528); Group 4 (prostate, PROS-Pt=192; bladder, BLAD-Pt=412); and Group 5 (liver, LIV-Pt=377; pancreatic, PANC-Pt=184; and gall bladder, BILE-Pt=36). The columns reflect the total percent patients positive for each of the markers divided by the total number of markers used—for the first row of all cancers, that would be 96 markers. Thus, on average, of the 96 markers chosen, the number of average sensitivity scores are: Group 1 (colorectal=44, stomach=45, esophagus=40); Group 2 (breast=38, endometrial=40, ovarian=22, cervical=39, uterine=33); Group 3 (lung adenocarcinoma=31, lung squamous cell carcinoma=31, head & neck=33); Group 4 (prostate=45, bladder=36); and Group 5 (liver=38, pancreatic=27, gall bladder=47). This translates into the following number of marker equivalents with average sensitivities of 50% (=96×score/50); (colorectal=85 marker equivalents; stomach=86 marker equivalents; esophagus=78 marker equivalents); Group 2 (breast=74 marker equivalents; endometrial=76 marker equivalents; ovarian=42 marker equivalents; cervical=75 marker equivalents; uterine=64 marker equivalents); Group 3 (lung adenocarcinoma=60 marker equivalents; lung squamous cell carcinoma=59 marker equivalents; head & neck=64 marker equivalents); Group 4 (prostate=86 marker equivalents; bladder=70 marker equivalents); and Group 5 (liver=74 marker equivalents; pancreatic=51 marker equivalents; gall bladder=91 marker equivalents). Thus, cancers were well represented, ranging from 42 to 91 marker equivalents for the different cancer types, and all were well above the minimum of 36 markers with average sensitivities of 50%.

[0302] The above numbers translate into the following number of marker equivalents with average sensitivities of 66% (=96×score/66); (colorectal=65 marker equivalents; stomach=65 marker equivalents; esophagus=59 marker equivalents); Group 2 (breast=56 marker equivalents; endometrial=58 marker equivalents; ovarian=32 marker equivalents; cervical=57 marker equivalents; uterine=48 marker equivalents); Group 3 (lung adenocarcinoma=45 marker equivalents; lung squamous cell carcinoma=45 marker equivalents; head & neck=48 marker equivalents); Group 4 (prostate=65 marker equivalents; bladder=53 marker equivalents); and Group 5 (liver=56 marker equivalents; pancreatic=39 marker equivalents; gall bladder=69 marker equivalents). Thus, cancers were well represented, ranging from 32 to 69 marker equivalents for the different cancer types, and, with the exception of ovarian cancer at 32, the other cancer types are above the minimum of 36 markers with average sensitivities of 66%.

[0303] The aforementioned markers were then re-ordered for each of the above cancer types such that the most prevalent markers were listed first. For example, with CRC, of the 96 markers, 54 markers gave scores above 55 (i.e. were positive in greater than 55% of the 395 patients) and 9 gave scores of between 25 and 54 (i.e. were positive for from 25% to 54% of the 395 patients). Half of the higher, and a third of the lower set, for a total of 30 markers, were distributed into two marker test sets, designated “CRC1” and “CRC2” (Table 41, rows 2 & 3). These marker sets would reflect an ideal result if half the markers with the potential to be positive are detected in the assay. This does not account for the chances that earlier stage tumors would have a lower number of marker molecules in the plasma, and thus, consequently, the actual number of markers positive would be less than the ideal result in this simulation. The percent of patients positive for each of the cancers was recorded and then divided by the total number of markers used for that cancer type. As anticipated, when selecting markers for a given tumor type, those markers should give a higher score than the average, i.e. 66 for CRC in each of the two sets of selected 30 markers, compared with a score of 44 for the unselected 96 markers. These markers form a diagonal across Table 41 and are highlighted in bold and light grey background.

[0304] For each column, marker sets that are in the same range or higher than the number of positive markers for that cancer type are also shown with a light grey background. For example, a patient with colorectal, stomach, or esophageal cancer will be scored as potentially positive with stomach cancer. This makes sense as the markers for these three cancers overlap, and they all bin to Group 1. So they could be distinguished in step 2 of the assay on the group 1 markers, wherein these markers are more cancer types specific, to tease out the most probable cancer type. Evaluation of the ST-Pt column shows that simulations for one of the two LUAD, BLAD, and both PANC also gave scores that might be interpreted as stomach cancer. Thus, the first step is not always able to pinpoint what Groups should be tested in the second step of the assay. However, most of the ambiguity is within group members (i.e. Group 2), and this makes sense, since the markers were chosen to maximize the ability to chose which groups to test in the second step.

[0305] Tables 42 and 43 (see prophetic experimental section) take the aforementioned results in the simulations in Table 41 and multiplies them by the percent incidence of the given cancer type for that gender (see Tables 37 and 38 respectively). The result is adjusted to the same order of magnitude (multiple by 10). The concept is for the physician to take into account that a lower score for a high incidence cancer (such as CRC) may be a more common tissue of origin for a higher score for a low incidence cancer (such as lung squamous cell carcinoma). Tables 42 and 43 show the level of ambiguity in identifying tissue of origin is higher among female patients than among male patients, as indicated by the number of cells highlighted in grey that are not on the diagonal. In all cases, the physician will need to incorporate all data, such as smoking history, not just molecular data, to determine the most likely tissue of origin before sending the patient to confirmatory imaging.

[0306] Tables 44, 45, and 46 (see prophetic experimental section) take the aforementioned results in the simulations in Tables 41, 42, and 43 and determines the percent deviation from the neutral result by taking the percentage of (=score specific cancer type simulation/score all cancer for that type−1). Thus, the first row of each of these tables should be 0%. Again, those percentages that are higher than, or in the same range as, the percentages across the diagonal are highlighted in light gray. While this set of marker selection may be less than ideal for distinguishing esophageal or gall bladder cancers as the tissue of origin, they are nevertheless quite informative for guiding the physician to which groups of the Step 2 assays should be tested. This simple scoring may be augmented by using AI approaches based on a database of results with clinical samples using the aforementioned 96-marker set.

[0307] For the second step of the assay, one or two or more of the following groups will be tested, each group with a set of 64 markers that on average comprise at least 36 markers with 50% sensitivity that covers each of the aforementioned 16 types of solid tumors, in the following groups: Group 1 (colorectal, stomach, and esophagus); Group 2 (breast, endometrial, ovarian, cervical, and uterine); Group 3 (lung and head & neck); Group 4 (prostate and bladder); and Group 5 (liver, pancreatic, or gall bladder). These Group-specific and cancer type-specific markers include, but are not limited to, cancer-specific microRNA markers, cancer-specific ncRNA and lncRNA markers, cancer-specific exon transcripts, tumor-associated antigens, cancer protein markers, protein markers that can be secreted by solid tumors into the blood, common mutations, primary CpG sites that are solid tumor and tissue specific markers, chromosomal regions or sub-regions within which are primary CpG sites that are solid tumor and tissue specific markers, and primary and flanking CpG sites that are solid tumor and tissue specific markers. Methods for detecting said markers have been discussed supra, and Figures listing these markers are described for each of the groups below.

[0308] Group 1 (colorectal, stomach, and esophagus): Blood-based, colorectal, stomach, and esophageal cancer-specific microRNA markers that may be used to distinguish group 1 from other groups include, but are not limited to: (mir ID, Gene ID): hsa-mir-624, MIR624. This miRNA was identified through analysis of TCGA microRNA datasets, and may be present in exosomes, tumor-associated vesicles, Argonaute complexes, or other protected states in the blood.

[0309] Blood-based, colorectal, stomach, and esophageal cancer-specific ncRNA and lncRNA markers that may be used to distinguish group 1 from other groups include, but are not limited to: [Gene ID, Coordinate (GRCh38)], ENSEMBL ID: LINC01558, chr6:167784537-167796859, ENSG00000146521.8. This ncRNA was identified through comparative analysis of various publicly available Affymetrix Exon ST CEL data, which were aligned to GENCODE annotations to generate ncRNA and lncRNA transcriptome datasets. Such lncRNA and ncRNA may be enriched in exosomes or other protected states in the blood.

[0310] In addition, FIG. 46 provides a list of blood-based colorectal, stomach, and esophageal cancer-specific exon transcripts that may be enriched in exosomes, tumor-associated vesicles, or other protected states in the blood.

[0311] Colorectal, stomach, and esophageal cancer protein encoding markers that may be used to distinguish group 1 from other groups include, but are not limited to: (Gene Symbol, Chromosome Band Gene Title, UniProt ID): SELE, 1q22-q25, selectin E, P16581; OTUD4, 4q31.21, OTU domain containing 4, Q01804; BPI, 20q11.23, bactericidal/permeability-increasing protein, P17213; ASB4, 7q21-q22, ankyrin repeat and SOCS box containing 4, Q9Y574; C6orf123, 6q27, chromosome 6 open reading frame 123, Q9Y6Z2; KPNA3, 13q14.3, karyopherin alpha 3 (importin alpha 4), 000505; NUP98, 11p15, nucleoporin 98 kDa, P52948, identified through mRNA sequences, protein expression levels, protein product concentrations, cytokines, or autoantibody to the protein product arising from colorectal, stomach, and esophageal cancers, which may be identified in the blood, either within exosomes, other protected states, tumor-associated vesicles, or free within the plasma.

[0312] Protein markers that can be secreted by colorectal, stomach, and esophageal cancer into the blood, and may be used to distinguish group 1 from other groups include, but are not limited to: (Protein name, UniProt ID); Bactericidal permeability-increasing protein (BPI) (CAP 57), P1721. A comparative analysis was performed across various TCGA datasets (tumors, normals), followed by an additional bioinformatics filter (Meinken et al., “Computational Prediction of Protein Subcellular Locations in Eukaryotes: an Experience Report,” Computational Molecular Biology 2(1):1-7 (2012), which is hereby incorporated by reference in its entirety), which predicts the likelihood that the translated protein is secreted by the cells.

[0313] The distribution of mutations in colorectal, stomach, and esophageal cancer are available in the public COSMIC database, with the most common being: APC (APC regulator of WNT signaling pathway), ATM (ATM serine/threonine kinase), CSMD1 (CUB and Sushi multiple domains 1), DNAH11 (dynein axonemal heavy chain 11), DST (dystonin), EP400 (E1A binding protein p400), FAT3 (FAT atypical cadherin 3), FAT4 (FAT atypical cadherin 4), FLG (filaggrin), GLI3 (GLI family zinc finger 3), KRAS (Ki-ras2 Kirsten rat sarcoma viral oncogene homolog), LRP1B (LDL receptor related protein 1B), MUC16 (mucin 16, cell surface associated), OBSCN (obscurin, cytoskeletal calmodulin and titin-interacting RhoGEF), PCLO (piccolo presynaptic cytomatrix protein), PIK3CA (phosphatidylinositol-4,5-bisphosphate 3-kinase catalytic subunit alpha), RYR2 (ryanodine receptor 2), SYNE1 (spectrin repeat containing nuclear envelope protein 1), TP53 (tumor protein p53), TTN (titin), and UNC13C (unc-13 homolog C).

[0314] FIG. 47 provides a list of primary CpG sites that are colorectal, stomach, and esophageal cancer and tissue-specific markers, that may be used to identify the presence of colorectal, stomach, and esophageal cancer from cfDNA, or DNA within exosomes, or DNA in other protected states (such as within CTCs) within the blood. FIG. 48 provides a list of chromosomal regions or sub-regions within which are primary CpG sites that are colorectal, stomach, and esophageal cancer and tissue-specific markers, that may be used to identify the presence of colorectal, stomach, and esophageal cancer from cfDNA, or DNA within exosomes, or DNA in other protected states (such as within CTCs) within the blood. FIG. 57 provides a list of primary and flanking CpG sites that are colorectal, stomach, and esophageal cancer and tissue-specific markers, that may be used to identify the presence of colorectal, stomach, and esophageal cancer from cfDNA, or DNA within exosomes, or DNA in other protected states (such as within CTCs) within the blood. These lists contain preferred primary CpG sites and their flanking sites, as well as alternative markers that are high in CRC, and alternative markers that are low to no-CRC, but high in stomach and/or esophageal cancers. Primer sets for exemplary preferred and alternate methylation markers are listed in Table 47 in the prophetic experimental section. A selection of 64 of these markers with average sensitivities of 50% gave the following scores for Group 1: (colorectal=48, stomach=51, esophagus=43), which would translate into the following number of marker equivalents with average sensitivities of 50% (=64×score/50); (colorectal=62 marker equivalents; stomach=65 marker equivalents; esophagus=55 marker equivalents). Thus, all were well above the average 36-marker equivalents minimum. The marker equivalents with average sensitivities of 66% (=64×score/66); (colorectal=47 marker equivalents; stomach=50 marker equivalents; esophagus=42 marker equivalents). Thus, all were well above the average 36-marker equivalents minimum.

[0315] Group 2 (breast, endometrial, ovarian, cervical, and uterine): Blood-based, breast, endometrial, ovarian, cervical, and uterine cancer-specific microRNA markers may be used to distinguish group 2 from other groups include, but are not limited to: (mir ID, Gene ID): hsa-mir-1265, MIR1265. This marker was identified through analysis of TCGA microRNA datasets, which may be present in exosomes, tumor-associated vesicles, Argonaute complexes, or other protected states in the blood.

[0316] Blood-based breast, endometrial, ovarian, cervical, and uterine cancer-specific exon transcripts may be used to distinguish group 2 from other groups include, but are not limited to: (Exon location, Gene); chr2:179209013-179209087:+, OSBPL6; chr2:179251788-179251866:+, OSBPL6; and chr2:179253736-179253880:+, OSBPL6, and may be enriched in exosomes, tumor-associated vesicles, or other protected states in the blood.

[0317] Breast, endometrial, ovarian, cervical, and uterine cancer protein markers, identified through mRNA sequences, protein expression levels, protein product concentrations, cytokines, or autoantibody to the protein product arising from breast, endometrial, ovarian, cervical, and uterine cancer protein markers, may be used to distinguish group 2 from other groups include, but are not limited to: (Gene Symbol, Chromosome Band, Gene Title, UniProt ID): RSPO2, 8q23.1, R-spondin 2, Q6UXX9; KLC4, 6p21.1, kinesin light chain 4, Q9NSK0; GLRX, 5q14, glutaredoxin (thioltransferase), P35754. These markers may be identified through mRNA sequences, protein expression levels, protein product concentrations, cytokines, or autoantibody to the protein product arising from breast, endometrial, ovarian, cervical, and uterine cancers, which may be identified in the blood, either within exosomes, other protected states, tumor-associated vesicles, or free within the plasma.

[0318] Protein markers that can be secreted by breast, endometrial, ovarian, cervical, and uterine cancer into the blood may be used to distinguish group 2 from other groups include, but are not limited to: (Protein name, UniProt ID); R-spondin-2 (Roof plate-specific spondin-2) (hRspo2), Q6UXX9. A comparative analysis was performed across various TCGA datasets (tumors, normals), followed by an additional bioinformatics filter (Meinken et al., “Computational Prediction of Protein Subcellular Locations in Eukaryotes: an Experience Report,” Computational Molecular Biology 2(1):1-7 (2012), which is hereby incorporated by reference in its entirety), which predicts the likelihood that the translated protein is secreted by the cells.

[0319] The distribution of mutations in breast, endometrial, ovarian, cervical, and uterine cancer are available in the public COSMIC database, with the 20 most commonly altered genes listed as: PIK3CA (phosphatidylinositol-4,5-bisphosphate 3-kinase catalytic subunit alpha), and TTN (titin).

[0320] FIG. 49 provides a list of primary CpG sites that are breast, endometrial, ovarian, cervical, and uterine cancer and tissue-specific markers, that may be used to identify the presence of breast, endometrial, ovarian, cervical, and uterine cancer from cfDNA, DNA within exosomes, or DNA in other protected states (such as within CTCs) within the blood. FIG. 50 provides a list of chromosomal regions or sub-regions within which are primary CpG sites that are breast, endometrial, ovarian, cervical, and uterine cancer and tissue-specific markers, that may be used to identify the presence of breast, endometrial, ovarian, cervical, and uterine cancer from cfDNA, DNA within exosomes, or DNA in other protected states (such as within CTCs) within the blood. FIG. 65 provides a list of primary and flanking CpG sites that are breast, endometrial, ovarian, cervical, and uterine cancer and tissue-specific markers, that may be used to identify the presence of breast, endometrial, ovarian, cervical, and uterine cancer from cfDNA, DNA within exosomes, or DNA in other protected states (such as within CTCs) within the blood. These lists contain preferred primary CpG sites and their flanking sites, as well as alternative markers that may be used to distinguish breast, endometrial, ovarian, cervical, and uterine cancers. Primer sets for exemplary preferred and alternate methylation markers are listed in Table 48 in the prophetic experimental section. A selection of 64 of these markers with average sensitivities of 50% gave the following scores for Group 2: (breast=36, endometrial=49, ovarian=32, cervical=33, uterine=47), which would translate into the following number of markers equivalents with average sensitivities of 50% (=64×score/50); (breast=47 marker equivalents; endometrial=63 marker equivalents; ovarian=41 marker equivalents; cervical=42 marker equivalents; uterine=61 marker equivalents). Thus, all were well above the average 36-marker equivalents minimum. The marker equivalents with average sensitivities of 66% (=64×score/66); (breast=35 marker equivalents; endometrial=48 marker equivalents; ovarian=31 marker equivalents; cervical=32 marker equivalents; uterine=46 marker equivalents). Thus, three markers are below and two markers are above the average 36-marker equivalents minimum. However, such scores may be improved by selection of different markers.

[0321] Group 3 (lung adenocarcinoma, lung squamous cell carcinoma, and head & neck): Blood-based, lung, head, and neck cancer-specific microRNA markers may be used to distinguish group 3 from other groups include, but are not limited to: (mir ID, Gene ID): hsa-mir-28, MIR28. This marker was identified through analysis of TCGA microRNA datasets, and may be present in exosomes, tumor-associated vesicles, Argonaute complexes, or other protected states in the blood.

[0322] Blood-based lung, head, and neck cancer-specific exon transcripts may be used to distinguish group 3 from other groups include, but are not limited to: (Exon location, Gene); chr2: chr1:93307721-93309752:−, FAM69A; chr1:93312740-93312916:−, FAM69A; chr1:93316405-93316512:−, FAM69A; chr1:93341853-93342152:−, FAM69A; chr1:93426933-93427079:−, FAM69A; chr7:40221554-40221627:+, C7orf10; chr7:40234539-40234659:+, C7orf10;chr8:22265823-22266009:+, SLC39A14; chr8:22272293-22272415:+, SLC39A14; chr14:39509936-39510091:−, SEC23A; chr14:39511990-39512076:−, SEC23A, and may be enriched in exosomes, tumor-associated vesicles, or other protected states in the blood.

[0323] Lung, head, and neck cancer protein encoding markers that may be used to distinguish group 3 from other groups include, but are not limited to: (Gene Symbol, Chromosome Band, Gene Title, UniProt ID): STRN3, 14q13-q21, striatin, calmodulin binding protein 3, Q13033; LRRC17, 7q22.1, leucine rich repeat containing 17, Q8N6Y2; FAM69A, 1p22, family with sequence similarity 69, member A, Q5T7M9; ATF2, 2q32, activating transcription factor 2, P15336; BHMT, 5q14.1, betaine-homocysteine S-methyltransferase, Q93088; ODZ3/TENM3, 4q34.3-q35.1, teneurin transmembrane protein 3, Q9P273; ZFHX4, 8q21.11, zinc finger homeobox 4, Q86UP3. These markers may be identified through mRNA sequences, protein expression levels, protein product concentrations, cytokines, or autoantibody to the protein product arising from lung, head, and neck cancers, which may be identified in the blood, either within exosomes, other protected states, tumor-associated vesicles, or free within the plasma.

[0324] Protein markers that can be secreted by lung, head, and neck cancer into the blood may be used to distinguish group 3 from other groups include, but are not limited to: (Protein name, UniProt ID); Leucine-rich repeat-containing protein 17 (p37NB), Q8N6Y2. A comparative analysis was performed across various TCGA datasets (tumors, normals), followed by an additional bioinformatics filter (Meinken et al., “Computational Prediction of Protein Subcellular Locations in Eukaryotes: an Experience Report,” Computational Molecular Biology 2(1):1-7 (2012), which is hereby incorporated by reference in its entirety), which predicts the likelihood that the translated protein is secreted by the cells.

[0325] The distribution of mutations in lung, head, and neck cancer are available in the public COSMIC database, with the most common being: CSMD3 (CUB and Sushi multiple domains 3), DNAH5 (dynein axonemal heavy chain 5), FAT1 (FAT atypical cadherin 1), FLG (filaggrin), KRAS (Ki-ras2 Kirsten rat sarcoma viral oncogene homolog), LRP1B (LDL receptor related protein 1B), MUC16 (mucin 16, cell surface associated), PCLO (piccolo presynaptic cytomatrix protein), PKHD1L1 (PKHD1 like 1), RELN (reelin), RYR2 (ryanodine receptor 2), SI (sucrase-isomaltase), SYNE1 (spectrin repeat containing nuclear envelope protein 1), TP53 (tumor protein p53), TTN (titin), USH2A (usherin), and XIRP2 (xin actin binding repeat containing 2).

[0326] FIG. 51 provides a list of primary CpG sites that are lung, head, and neck cancer and tissue-specific markers, that may be used to identify the presence of lung, head, and neck cancer from cfDNA, DNA within exosomes, or DNA in other protected states (such as within CTCs) within the blood. FIG. 52 provides a list of chromosomal regions or sub-regions within which are primary CpG sites that are lung, head, and neck cancer and tissue-specific markers, that may be used to identify the presence of lung, head, and neck from cfDNA, DNA within exosomes, or DNA in other protected states (such as within CTCs) within the blood. FIG. 73 provides a list of primary and flanking CpG sites that are lung, head, and neck cancer and tissue-specific markers, that may be used to identify the presence of lung, head, and neck cancer from cfDNA, DNA within exosomes, or DNA in other protected states (such as within CTCs) within the blood. These lists contain preferred primary CpG sites and their flanking sites that may be used to distinguish lung, head, and neck cancers. Primer sets for exemplary preferred methylation markers are listed in Table 49 in the prophetic experimental section. A selection of 64 of these markers with average sensitivities of 50% gave the following scores for Group 3: (lung adenocarcinoma=41, lung squamous cell carcinoma=49, head & neck=53), which would translate into the following number of markers equivalents with average sensitivities of 50% (=64×score/50); (lung adenocarcinoma=52 marker equivalents; lung squamous cell carcinoma=62 marker equivalents; head & neck=67 marker equivalents). Thus, all were well above the average 36-marker equivalents minimum. The marker equivalents with average sensitivities of 66% were (=64×score/66); (lung adenocarcinoma=40 marker equivalents; lung squamous cell carcinoma=47 marker equivalents; head & neck=51 marker equivalents). Thus, all were well above the average 36-marker equivalents minimum.

[0327] Group 4 (prostate and bladder): Blood or urine-based, prostate and bladder cancer-specific microRNA markers may be used to distinguish group 4 from other groups include, but are not limited to: (mir ID, Gene ID): hsa-mir-491, MIR491; hsa-mir-1468, MIR1468. These markers were identified through analysis of TCGA microRNA datasets, and may be present in exosomes, tumor-associated vesicles, Argonaute complexes, or other protected states in the blood or urine.

[0328] Blood or urine-based, prostate and bladder cancer-specific ncRNA and lncRNA markers may be used to distinguish group 4 from other groups include, but are not limited to: [Gene ID, Coordinate (GRCh38), ENSEMBL ID]: AC007383.3, chr2:206084605-206086564, ENSG00000227946.1; LINC00324, chr17:8220642-8224043, ENSG00000178977.3. These markers were identified through comparative analysis of various publicly available Affymetrix Exon ST CEL data, which were aligned to GENCODE annotations to generate ncRNA and lncRNA transcriptome datasets. Such lncRNA and ncRNA may be enriched in exosomes or other protected states in the blood or urine.

[0329] Blood or urine-based prostate and bladder cancer-specific exon transcripts may be used to distinguish group 4 from other groups include, but are not limited to: (Exon location, Gene); chr21:45555942-45556055:+, C21orf33 and may be enriched in exosomes, tumor-associated vesicles, or other protected states in the blood or urine.

[0330] Prostate and bladder cancer protein markers that may be used to distinguish group 4 from other groups include, but are not limited to: (Gene Symbol, Chromosome Band, Gene Title, UniProt ID): PMM1, 22q13, phosphomannomutase 1, Q92871. This marker may be identified through mRNA sequences, protein expression levels, protein product concentrations, cytokines, or autoantibody to the protein product arising from lung, head, and neck cancers, which may be identified in the blood, either within exosomes, other protected states, tumor-associated vesicles, or free within the plasma, or within the urine.

[0331] The distribution of mutations in prostate and bladder cancer are available in the public COSMIC database, with the most common being: BAGE2 (BAGE family member 2), DNM1P47 (dynamin 1 pseudogene 47), FRG1BP (region gene 1 family member B, pseudogene), KRAS (Ki-ras2 Kirsten rat sarcoma viral oncogene homolog), RP11-156P1.3, TTN (titin), and TUBB8P7 (tubulin beta 8 class VIII pseudogene 7).

[0332] FIG. 53 provides a list of primary CpG sites that are prostate and bladder cancer-specific markers, that may be used to identify the presence of prostate and bladder cancer from cfDNA, DNA within exosomes, or DNA in other protected states (such as within CTCs) within the blood or urine. FIG. 54 provides a list of chromosomal regions or sub-regions within which are primary CpG sites that are prostate and bladder cancer specific markers, that may be used to identify the presence of prostate and bladder from cfDNA, DNA within exosomes, or DNA in other protected states (such as within CTCs) within the blood or urine. FIG. 81 provides a list of primary and flanking CpG sites that are prostate and bladder cancer-specific markers, that may be used to identify the presence of prostate and bladder cancer from cfDNA, DNA within exosomes, or DNA in other protected states (such as within CTCs) within the blood or urine. These lists contain preferred primary CpG sites and their flanking sites that may be used to distinguish prostate and bladder cancers. Primer sets for exemplary preferred methylation markers are listed in Table 50 in the prophetic experimental section. A selection of 48 of these markers with average sensitivities of 50% gave the following scores for Group 4: (prostate=48, bladder=22), which would translate into the following number of marker equivalents with average sensitivities of 50% (=48×score/50); (prostate=46 marker equivalents; bladder=21 marker equivalents). Thus, bladder was below the average 36-marker equivalents minimum. Likewise, the marker equivalents with average sensitivities of 66% were (=48×score/60); (prostate=35 marker equivalents; bladder=16 marker equivalents). Thus, bladder was well below the average 36-marker equivalents minimum. However, a different selection of markers, for example by increasing from 48 to 64 markers and including markers that were positive for both prostate and bladder, would rectify this situation. The markers were limited to those that were not methylated in normal prostate, bladder, or kidney tissue to minimize false-positive results from urine samples.

[0333] Group 5 (liver, pancreatic and gall-bladder): Blood-based, liver, pancreatic and gall-bladder cancer-specific microRNA markers may be used to distinguish group 5 from other groups include, but are not limited to: (mir ID, Gene ID): hsa-mir-132, MIR132. This marker was identified through analysis of TCGA microRNA datasets, which may be present in exosomes, tumor-associated vesicles, Argonaute complexes, or other protected states in the blood.

[0334] FIG. 55 provides a list of blood-based, liver, pancreatic and gall-bladder cancer-specific ncRNA and lncRNA markers derived through comparative analysis of various publicly available Affymetrix Exon ST CEL data, which were aligned to GENCODE annotations to generate ncRNA and lncRNA transcriptome datasets. Such lncRNA and ncRNA may be enriched in exosomes or other protected states in the blood.

[0335] In addition, FIG. 56 provides a list of blood-based liver, pancreatic and gall-bladder cancer-specific exon transcripts that may be enriched in exosomes, tumor-associated vesicles, or other protected states in the blood.

[0336] FIG. 57 provides a list of liver, pancreatic and gall-bladder cancer protein markers, identified through mRNA sequences, protein expression levels, protein product concentrations, cytokines, or autoantibody to the protein product arising from liver, pancreatic and gall-bladder cancers, which may be identified in the blood, either within exosomes, other protected states, tumor-associated vesicles, or free within the plasma.

[0337] Protein markers that can be secreted by liver, pancreatic and gall-bladder cancer into the blood may be used to distinguish group 5 from other groups include, but are not limited to: (Protein name, UniProt ID); Gelsolin (AGEL) (Actin-depolymerizing factor) (ADF) (Brevin), P06396; Pro-neuregulin-2, 014511; CD59 glycoprotein (1F5 antigen) (20 kDa homologous restriction factor) (HRF-20) (HRF20) (MAC-inhibitory protein) (MAC-IP) (MEM43 antigen) (Membrane attack complex inhibition factor) (MACIF) (Membrane inhibitor of reactive lysis) (MIRL) (Protectin) (CD antigen CD59), P13987; Divergent protein kinase domain 2B (Deleted in autism-related protein 1), Q9H7Y0. A comparative analysis was performed across various TCGA datasets (tumors, normals), followed by an additional bioinformatics filter (Meinken et al., “Computational Prediction of Protein Subcellular Locations in Eukaryotes: an Experience Report,” Computational Molecular Biology 2(1):1-7 (2012), which is hereby incorporated by reference in its entirety), which predicts the likelihood that the translated protein is secreted by the cells.

[0338] The distribution of mutations in liver, pancreatic and gall-bladder cancer are available in the public COSMIC database, with the most common being: KRAS (Ki-ras2 Kirsten rat sarcoma viral oncogene homolog), MUC16 (mucin 16, cell surface associated), MUC4 (mucin 4, cell surface associated), TP53 (tumor protein p53), and TTN (titin).

[0339] FIG. 58 provides a list of primary CpG sites that are liver, pancreatic and gall-bladder cancer and tissue-specific markers, that may be used to identify the presence of lung, head, and neck cancer from cfDNA, DNA within exosomes, or DNA in other protected states (such as within CTCs) within the blood. FIG. 59 provides a list of chromosomal regions or sub-regions within which are primary CpG sites that are liver, pancreatic and gall-bladder cancer and tissue-specific markers, that may be used to identify the presence of liver, pancreatic and gall-bladder from cfDNA, or DNA within exosomes, or DNA in other protected states (such as within CTCs) within the blood. These lists contain preferred primary CpG sites and their flanking sites, as well as alternative markers that may be used to distinguish liver, pancreatic and gall-bladder cancers. Primer sets for exemplary preferred and alternate methylation markers are listed in Table 51 in the prophetic experimental section. A selection of 64 of these markers with average sensitivities of 50% gave the following scores for Group 5: (liver=57, pancreatic=30, gall bladder=60), which would translate into the following number of marker equivalents with average sensitivities of 50% (=64×score/50); (liver=73 marker equivalents; pancreatic=38 marker equivalents; gall bladder=77 marker equivalents). Thus, all were above the average 36-marker equivalents minimum. The marker equivalents with average sensitivities of 66% were (=64×score/66); (liver=56 marker equivalents; pancreatic=29 marker equivalents; gall bladder=58 marker equivalents). Thus, liver and gall bladder were above the average 36-marker equivalents minimum, while pancreatic was below.

[0340] Returning now to the strategy wherein in the first step is to identify markers that cover as many cancers as possible, irrespective of group, and yet are sufficiently diverse as to cover cancers in all 5 groups (FIGS. 1G, 1H, 1K and 1L), consider the aim is to have a very sensitive detection of early cancer, where the first step of the assay would use a set of 64 markers that on average comprise of at least 36 markers with 75% sensitivity that covers each of the aforementioned 16 types of solid tumors (covered in the 5 Groups).

[0341] A deep analysis of the TCGA database of methylation markers that are absent in blood but on average are present in many solid tumor types at 75% sensitivity show a paucity of markers for pancreatic, lung adenocarcinoma, lung squamous cell carcinoma, and ovarian cancer. Consequently, to assemble a set of 64 markers that satisfied the criteria of at least 36 markers with 75% sensitivity that covers each of the aforementioned 16 types of solid tumors, the markers were focused on coverage of those cancers first, and bringing up the numbers for the other cancers by choosing markers that were well represented for other cancers as well, with the following average sensitivity scores: Group 1 (colorectal=75, stomach=68, esophagus=72); Group 2 (breast=66, endometrial=73, ovarian=54, cervical=73, uterine=67); Group 3 (lung adenocarcinoma=54, ung squamous cell carcinoma=58, head & neck=64); Group 4 (prostate=72, bladder=63); and Group 5 (liver=53, pancreatic=45, gall bladder=68). This translates into the following number of marker equivalents with average sensitivities of 75% (=64×score/75); (colorectal=64 marker equivalents; stomach=58 marker equivalents; esophagus=61 marker equivalents); Group 2 (breast=57 marker equivalents; endometrial=62 marker equivalents; ovarian=46 marker equivalents; cervical=62 marker equivalents; uterine=57 marker equivalents); Group 3 (lung adenocarcinoma=46 marker equivalents; lung squamous cell carcinoma=49 marker equivalents; head & neck=54 marker equivalents); Group 4 (prostate=61 marker equivalents; bladder=53 marker equivalents); and Group 5 (liver=45 marker equivalents; pancreatic=39 marker equivalents; gall bladder=58 marker equivalents). Thus, cancers were well represented, ranging from 39 to 64 marker equivalents for the different cancer types, and all above the minimum of 36 markers with average sensitivities of 75%.

[0342] FIG. 60 provides a list of primary CpG sites that are solid tumor and tissue-specific markers, that may be used to identify the presence of solid tumors from cfDNA, or DNA within exosomes, or DNA in other protected states (such as within CTCs) within the blood. FIG. 61 provides a list of chromosomal regions or sub-regions within which are primary CpG sites that are solid tumors and tissue-specific markers, that may be used to identify the presence of solid tumors from cfDNA, DNA within exosomes, or DNA in other protected states (such as within CTCs) within the blood. FIG. 92 provides a list of primary and flanking CpG sites that are solid tumors and tissue-specific markers, that may be used to identify the presence of solid tumor from cfDNA, DNA within exosomes, or DNA in other protected states (such as within CTCs) within the blood. These lists contain preferred primary CpG sites and their flanking sites, as well as preferred alternative markers, and additional alternative markers that are high in multiple cancers. Primer sets for exemplary preferred and alternate methylation markers are listed in Table 52 in the prophetic experimental section. These primers are not designed to identify specific types of tissue of origin, but simply determine with reasonable sensitivity and specificity (see below) if the patient has a hidden early cancer within. Those patients with 5 or more markers positive are then automatically subjected to additional tests to determine most probable tissue of origin. As written earlier, one approach is to continue with the set of markers already described, i.e. use the 96-marker set that on average comprise at least 36 markers with 50% sensitivity for each tumor type (FIG. 1G or 1H). Another approach would be to start with the set of 96 markers that on average comprise at least 36 markers with 50% sensitivity, and then in step 2 continue with 1-2 sets of 48 group-specific markers that on average comprise of at least 36 markers with 75% sensitivity that covers each of the aforementioned types of solid tumors that may be present in that group (FIG. 1F). By scoring the markers that are positive and comparing to predicted positives for each cancer type within the group tested, the physician can identify the most probable tissue of origin, and subsequently send the patient to the appropriate imaging.

[0343] For the second step of the assay in FIG. 1F, one to two of the following groups will be tested, each group with a set of 48 markers that on average comprise at least 36 markers with 75% sensitivity that covers each of the aforementioned 16 types of solid tumor. These high percentage hit markers are also ideally suited for monitoring treatment efficacy and recurrence (see below). Tumors were in the following groups: Group 1 (colorectal, stomach, and esophagus); Group 2 (breast, endometrial, ovarian, cervical, and uterine); Group 3 (lung and head & neck); Group 4 (prostate and bladder); and Group 5 (liver, pancreatic, or gall bladder). These Group-specific and cancer type-specific markers include, but are not limited to, cancer-specific microRNA markers, cancer-specific ncRNA and lncRNA markers, cancer-specific exon transcripts, tumor-associated antigens, cancer protein markers, protein markers that can be secreted by solid tumors into the blood, common mutations, primary CpG sites that are solid tumor and tissue specific markers, chromosomal regions or sub-regions within which are primary CpG sites that are solid tumor and tissue specific markers, and primary and flanking CpG sites that are solid tumor and tissue specific markers. Methods for detecting said markers have been discussed earlier in this application, and Figures listing these markers are described for each of the groups below.

[0344] FIG. 62 provides a list of primary CpG sites that are colorectal, stomach, and esophageal cancer and tissue-specific markers, that may be used to identify the presence of colorectal, stomach, and esophageal cancer from cfDNA, DNA within exosomes, or DNA in other protected states (such as within CTCs) within the blood. FIG. 63 provides a list of chromosomal regions or sub-regions within which are primary CpG sites that are colorectal, stomach, and esophageal cancer and tissue-specific markers, that may be used to identify the presence of colorectal, stomach, and esophageal cancer from cfDNA, or DNA within exosomes, or DNA in other protected states (such as within CTCs) within the blood. FIG. 95 provides a list of primary and flanking CpG sites that are colorectal, stomach, and esophageal cancer and tissue-specific markers, that may be used to identify the presence of colorectal, stomach, and esophageal cancer from cfDNA, DNA within exosomes, or DNA in other protected states (such as within CTCs) within the blood. These lists contain preferred primary CpG sites and their flanking sites, and alternative markers that are high in colorectal, stomach and esophageal cancers. Primer sets for exemplary preferred and alternate methylation markers are listed in Table 53 in the prophetic experimental section. A selection of 48 of these markers with average sensitivities of 75% gave the following scores for Group 1: (colorectal=87, stomach=72, esophagus=75). This translates into the following number of marker equivalents with average sensitivities of 75% (=48×score/75); (colorectal=56 marker equivalents; stomach=46 marker equivalents; esophagus=48 marker equivalents). Thus, all were well above the average 36-marker equivalents minimum.

[0345] FIG. 64 provides a list of primary CpG sites that are breast, endometrial, ovarian, cervical, and uterine cancer and tissue-specific markers, that may be used to identify the presence of breast, endometrial, ovarian, cervical, and uterine cancer from cfDNA, DNA within exosomes, or DNA in other protected states (such as within CTCs) within the blood. FIG. 65 provides a list of chromosomal regions or sub-regions within which are primary CpG sites that are breast, endometrial, ovarian, cervical, and uterine cancer and tissue-specific markers, that may be used to identify the presence of breast, endometrial, ovarian, cervical, and uterine cancer from cfDNA, DNA within exosomes, or DNA in other protected states (such as within CTCs) within the blood. These lists contain preferred primary CpG sites and their flanking sites that may be used to distinguish breast, endometrial, ovarian, cervical, and uterine cancers. Primer sets for exemplary preferred and alternate methylation markers are listed in Table 54 in the prophetic experimental section. A selection of 48 of these markers with average sensitivities of 75% gave the following scores for Group 2: (breast=70, endometrial=85, ovarian=70, cervical=75, uterine=83). This would translate into the following number of marker equivalents with average sensitivities of 75% (=48×score/75); (breast=45 marker equivalents; endometrial=54 marker equivalents; ovarian=45 marker equivalents; cervical=48 marker equivalents; uterine=53 marker equivalents). Thus, all were well above the average 36-marker equivalents minimum.

[0346] FIG. 66 provides a list of primary CpG sites that are lung, head, and neck cancer and tissue-specific markers, that may be used to identify the presence of lung, head, and neck cancer from cfDNA, DNA within exosomes, or DNA in other protected states (such as within CTCs) within the blood. FIG. 67 provides a list of chromosomal regions or sub-regions within which are primary CpG sites that are lung, head, and neck cancer and tissue-specific markers, that may be used to identify the presence of lung, head, and neck from cfDNA, DNA within exosomes, or DNA in other protected states (such as within CTCs) within the blood. These lists contain preferred primary CpG sites and their flanking sites that may be used to distinguish lung, head, and neck cancers. Primer sets for exemplary preferred and alternate methylation markers are listed in Table 55 in the prophetic experimental section. A selection of 48 of these markers with average sensitivities of 75% gave the following scores for Group 3: (lung adenocarcinoma=62, lung squamous cell carcinoma=67, head & neck=69). This would translate into the following number of marker equivalents with average sensitivities of 75% (=48×score/75); (lung adenocarcinoma=39 marker equivalents; lung squamous cell carcinoma=43 marker equivalents; head & neck=44 marker equivalents). Thus, all were well above the average 36-marker equivalents minimum.

[0347] FIG. 68 provides a list of primary CpG sites that are prostate and bladder cancer-specific markers, that may be used to identify the presence of prostate and bladder cancer from cfDNA, DNA within exosomes, or DNA in other protected states (such as within CTCs) within the blood or within the urine. FIG. 69 provides a list of chromosomal regions or sub-regions within which are primary CpG sites that are prostate and bladder cancer specific markers, that may be used to identify the presence of prostate and bladder from cfDNA, DNA within exosomes, or DNA in other protected states (such as within CTCs) within the blood or urine. These lists contain preferred primary CpG sites and their flanking sites that may be used to distinguish prostate and bladder cancers. Primer sets for exemplary preferred and alternate methylation markers for Prostate, Bladder and Kidney Cancer from a blood sample are listed in Table 56 in the prophetic experimental section. Primer sets for exemplary preferred and alternate methylation markers for Prostate and Bladder Cancer from a urine sample are listed in Table 57 in the prophetic experimental section. Most of the kidney-specific methylation markers are found in normal kidney tissue, and thus these would not be suitable for use in a urine test. A selection of 48 of these markers with average sensitivities of 75% gave the following scores for Group 4: (prostate=70, bladder=66). This would translate into the following number of marker equivalents with average sensitivities of 75% (=48×score/75); (prostate=45 marker equivalents; bladder=42 marker equivalents). Thus, all are well above the average 36-marker equivalents minimum.

[0348] FIG. 70 provides a list of primary CpG sites that are liver, pancreatic and gall-bladder cancer and tissue-specific markers, that may be used to identify the presence of lung, head, and neck cancer from cfDNA, DNA within exosomes, or DNA in other protected states (such as within CTCs) within the blood. FIG. 71 provides a list of chromosomal regions or sub-regions within which are primary CpG sites that are liver, pancreatic and gall-bladder cancer and tissue-specific markers, that may be used to identify the presence of liver, pancreatic and gall-bladder from cfDNA, DNA within exosomes, or DNA in other protected states (such as within CTCs) within the blood. These lists contain preferred primary CpG sites and their flanking sites that may be used to distinguish liver, pancreatic and gall-bladder cancers. Primer sets for exemplary and alternate preferred methylation markers are listed in Table 57 in the prophetic experimental section. A selection of 64 of these markers with average sensitivities of 75% gave the following scores for Group 5: (liver=68, pancreatic=58, gall bladder=74). This would translate into the following number of marker equivalents with average sensitivities of 75% (=48×score/75); (liver=43 marker equivalents; pancreatic=37 marker equivalents; gall bladder=48 marker equivalents). Thus, all were above the average 36-marker equivalents minimum.

[0349] The aforementioned markers with average sensitivities of 75% may also be used to monitor recurrence in melanoma. Primer sets for exemplary preferred and alternate methylation markers are listed in Table 57 in the prophetic experimental section.

[0350] How would the different Pan-oncology tests compare with each other for detecting either colorectal cancer (both sexes) or ovarian cancer in the US? For the illustrative examples below: (1) The pan-oncology test of 96 markers with average sensitivities of 50% wherein >36 markers/group are positive with each cancer. For colorectal=84 marker equivalents; for ovarian=42 marker equivalents. The marker false-positive rates of 3%, for colorectal cancer will be calculated at 48 markers, while for ovarian cancer will be calculated at 36 markers, with a minimum of 5 positives to go to Step 2 or imaging. (2) The pan-oncology test of 64 markers with average sensitivities of 75% wherein >36 markers/group are positive with each cancer. For colorectal=64 marker equivalents; for ovarian=46 marker equivalents. The marker false-positive rate of 3%, for colorectal cancer will be calculated at 48 markers, while for ovarian cancer will be calculated at 36 markers, with a minimum of 5 positives to go to Step 2. (3) The group-specific step of 64 markers with average sensitivities of 50% wherein >36 markers/group are positive with each cancer. For colorectal=61 marker equivalents; for ovarian=41 marker equivalents. The marker false-positive rates of 3%, for colorectal cancer will be calculated at 48 markers, while for ovarian cancer will be calculated at 36 markers, with a minimum of 5 positives to go to imaging. (4) The group-specific step of 48 markers with average sensitivities of 75% wherein >36 markers/group are positive with each cancer. For colorectal=56 marker equivalents; for ovarian=45 marker equivalents. The marker false-positive rates of 3%, for colorectal cancer will be calculated at 48 markers, while for ovarian cancer will be calculated at 36 markers, with a minimum of 5 positives to go to imaging.

[0351] Consider the first strategy using the 96 pan-oncology markers of detecting early colorectal cancer (FIG. 1C). The calculations are done with the anticipation of an average of 150 methylated molecules per positive marker in the blood. As described supra, for the example of colorectal cancer, in particular the cases of microsatellite stable tumors (MSS) where the mutation load is low, for these calculations when relying on NGS sequencing alone (assuming 150 molecules with one mutation in the blood), an estimated 78% of early colorectal cancer would be missed. Again, to put these number in perspective, in the U.S., about 135,000 new cases of colorectal cancer were diagnosed in 2018, of which about 60% is late cancer (i.e. Stage III & IV). About 107 million individuals in the U.S. are over the age of 50 and should be tested for colorectal cancer. While it cannot be predicted how many individuals have a hidden cancer (i.e. Stage I) within them, who are non-compliant to testing, for the purposes of this calculation, assume that the average late cancer was once the average early cancer, and thus individuals with Stage I cancer would be about 40,500 individuals. Assuming individual marker false-positive rates of 3%, and with the first step using 96 markers (48 markers for CRC) with average sensitivities of 50%, requiring a minimum of 5 markers positive, then with an overall specificity of 95.8%, the first step would identify 4,494,000 individuals (out of 107,000,000 total adults over 50 in the U.S.) which would include at 71.6% sensitivity or about 28,998 individuals with Stage I colorectal cancer (out of 40,500 individuals with Stage I cancer). However, those 4,494,000 presumptive positive individuals would be evaluated in a second step of 64 markers (48 markers for CRC) with average sensitivities of 50%, requiring a minimum of 5 markers positive, then the two-step test would identify 71.6%×71.6%=51.2%=20,762 individuals (out of 40,500 individuals with Stage I cancer) with colorectal cancer. With a specificity of 95.8%, the second test would also generate 4,494,000×4.2%=188,748 false-positives. The positive predictive value of such a test would be 20,762/(188,748+20,762)=9.9%, in other words, 1 in 10 individuals who tested positive would actually have Stage I colorectal cancer. In reality, one would need to also include the success for identifying Stage 2 and higher cancers. In expanding this example, the calculations are done with the anticipation that Stage I CRC has an average of 150 methylated molecules per positive marker in the blood, Stage II CRC has an average of 200 methylated molecules per positive marker, and the higher stages (III & IV) have at least an average of 300 methylated molecules per positive marker, and the higher stages. Also, to be consistent with the idea that as the test is used repeatedly, more of early and less of late CRC will be detected, than an estimate of 40,500 individuals with Stage I cancer, 40,500 individuals with Stage II cancer, and the remaining 54,000 individuals have late-stage cancer=135,000 total individuals with colorectal cancer identified per year in the U.S. The above calculation already provided the false-positive rate for the early cancer. For Stage II cancer, 90.1% would be identified in the first step, of which 90.1%×90.1%=81.0%=32,877 individuals with Stage II cancer would be verified in the second step. For Stage III and IV cancer, 99.3% would be identified in the first step, of which 99.3%×99.3%=98.6%=53,246 individuals with late cancer would be identified. This brings the total identified at 20,762+32,877+53,246=106,885 individuals out of 135,000 with colorectal cancer, for an overall sensitivity of 79%. Overall, the positive predictive value of such a test would be 106,885/(188,748+106,885)=36.1%, in other words, 1 in 3 individuals who tested positive would actually have colorectal cancer, and this test would identify 53,639/81,000 or 66% of those individuals with early cancer, compared with the current rate of 40%.

[0352] How would these results vary for using this strategy (FIG. 1C) for detection of early colorectal cancer using 50% average marker sensitivities, with the anticipation of Stage I CRC having an average of 200 methylated molecules per positive marker in the blood, Stage II CRC having an average of 240 methylated molecules per positive marker, and the higher stages (III & IV) having at least an average of 300 methylated molecules per positive marker?

[0353] Assuming individual marker false-positive rates of 3%, the first step using 96 markers (48 markers for CRC) with average sensitivities of 50%, requiring a minimum of 5 markers positive, and an overall specificity of 95.8%, the first step would identify 4,494,000 individuals (out of 107,000,000 total adults over 50 in the U.S.). This would include, at 90.1% sensitivity, or about 36,490 individuals with Stage I colorectal cancer (out of 40,500 individuals with Stage I cancer). However, those 4,494,000 presumptive positive individuals would be evaluated in a second step of 64 markers (48 markers for CRC) with average sensitivities of 50%, requiring a minimum of 5 markers positive. The two-step test would identify 90.1%×90.1%=81.2%=32,877 individuals (out of 40,500 individuals with Stage I cancer) with colorectal cancer. With a specificity of 95.8%, the second test would also generate 4,494,000×4.2%=188,748 false-positives. The positive predictive value of such a test would be 32,877/(188,748+32,877)=14.8%. In other words, 1 in 6.7 individuals who tested positive would actually have Stage I colorectal cancer. In reality, one would need to also include the success for identifying Stage 2 and higher cancers. To be consistent with the idea that, as the test is used repeatedly, more of early and less of late CRC will be detected, an estimated 40,500 individuals with Stage I cancer, 40,500 individuals with Stage II cancer, and 54,000 individuals with late-stage cancer (135,000 total individuals with colorectal cancer) would be identified per year in the U.S. The above calculation already provided the false-positive rate for the early cancer. For Stage II cancer, 90.1% would be identified in the first step, of which 97.2%×97.2%=94.5%=38,263 individuals with Stage II cancer would be verified in the second step. For Stage III and IV cancer, 99.3% would be identified in the first step, of which 99.3%×99.3%=98.6%=53,246 individuals with late cancer would be identified. This brings the total identified to 32,877+38,263+53,246=124,386 individuals out of 135,000 with colorectal cancer, for an overall sensitivity of 92.1%. Overall, the positive predictive value of such a test would be 124,386/(188,748+124,386)=39.7%. In other words, 1 in 2.5 individuals who tested positive would actually have colorectal cancer, and this test would identify 71,104/81,000 or 87.7% of those individuals with early cancer, compared with the current rate of 40%.

[0354] How would these results vary for using this strategy (FIG. 1C) for detection of early ovarian cancer, with the anticipation of an average of 150 methylated molecules per positive marker in the blood? When relying on NGS sequencing alone (assuming 150 molecules with one mutation in the blood), an estimated 78% of early ovarian cancer would be missed. Again, to put these number in perspective, in the U.S., about 22,000 new cases of ovarian cancer were diagnosed in 2018, of which about 85% was late cancer (i.e. Stage III & IV). About 54 million women in the U.S. are between the ages of 50 and 79 and should be tested for ovarian cancer. While it cannot be predicted how many individuals have a hidden cancer (i.e. Stage I), for the purposes of this calculation, assume that the stages are evenly divided. Thus, the number of individuals with Stage I ovarian cancer would be about 5,500 individuals. Assuming individual marker false-positive rates of 3%, the first step using 96 markers (36 markers for ovarian) with average sensitivities of 50%, requiring a minimum of 5 markers positive, and an overall specificity of 99.1%, the first step would identify 486,000 individuals (out of 54,000,000 total women ages 50-79 in the U.S.) with ovarian cancer. This would include, at 46.8% sensitivity, or about 2,574 individuals with Stage I ovarian cancer (out of 5,500 individuals with Stage I ovarian cancer). However, those 486,000 presumptive positive individuals would be evaluated in a second step of 64 markers (36 markers for ovarian cancer) with average sensitivities of 50%, requiring a minimum of 5 markers positive. The two-step test would identify 46.8%×46.8%=21.9%=1,204 individuals (out of 5,500 individuals with Stage I ovarian cancer) with ovarian cancer. With a specificity of 99.1%, the second test would also generate 486,000×0.9%=4,374 false-positives. The positive predictive value of such a test would be 1,204/(4,374+1,204)=21.6%. In other words, 1 in 4.6 individuals who tested positive would actually have Stage I ovarian cancer. In reality, one would need to also include the success for identifying Stage 2 and higher ovarian cancers. In expanding this example, the calculations are done with the anticipation that Stage I ovarian cancer has an average of 150 methylated molecules per positive marker in the blood, Stage II ovarian cancer has an average of 200 methylated molecules per positive marker, and the higher stages (III & IV) have at least an average of 300 methylated molecules per positive marker. To be consistent with the idea that, as the test is used repeatedly, more cancer will be detected and all four stages are at 5,500, then 5,500×4=22,000 total individuals with ovarian cancer would be identified per year in the U.S. The above calculation already provided the false-positive rate for the early cancer. For Stage II cancer, 71.5% would be identified in the first step, of which 71.5%×71.5%=51.1%=2,810 individuals with Stage II ovarian cancer would be verified in the second step. For Stage III and IV ovarian cancer, 94.5% would be identified in the first step, of which 94.5%×94.5%=89.3%=9,823 individuals with late ovarian cancer would be identified. This brings the total identified at 1,204+2,810+9,823=13,837 individuals out of 22,000 with ovarian cancer, for an overall sensitivity of 62.9%. Overall, the positive predictive value of such a test would be 13,837/(13,837+4,374)=76.0%. In other words, 3 in 4 women who tested positive would actually have ovarian cancer, and this test would identify 4,014/11,000, or 36.5%, of those individuals with early cancer, compared with the current rate of 15%.

[0355] How would these results vary for using this strategy (FIG. 1C) for detection of early ovarian cancer using 50% average marker sensitivities, with the anticipation that Stage I ovarian cancer has an average of 200 methylated molecules per positive marker in the blood, Stage II ovarian cancer has an average of 240 methylated molecules per positive marker, and the higher stages (III & IV) have at least an average of 300 methylated molecules per positive marker?

[0356] Assuming individual marker false-positive rates of 3%, the first step using 96 markers (36 markers for ovarian) with average sensitivities of 50%, and requiring a minimum of 5 markers positive, with an overall specificity of 99.1%, the first step would identify 486,000 individuals (out of 54,000,000 total women ages 50-79 in the U.S.) with ovarian cancer. This would include at, 71.5% sensitivity, about 3,932 individuals with Stage I ovarian cancer (out of 5,500 individuals with Stage I ovarian cancer). However, those 486,000 presumptive positive individuals would be evaluated in a second step of 64 markers (36 markers for ovarian cancer) with average sensitivities of 50%, requiring a minimum of 5 markers positive. The two-step test would identify 71.5%×71.5%=51.1%=2,810 individuals (out of 5,500 individuals with Stage I ovarian cancer) with ovarian cancer. With a specificity of 99.1%, the second test would also generate 486,000×0.9%=4,374 false-positives. The positive predictive value of such a test would be 2,810/(4,374+2,810)=39.1%. In other words, 1 in 2.5 individuals who tested positive would actually have Stage I ovarian cancer. In reality, one would need to also include the success for identifying Stage 2 and higher ovarian cancers. As the test is used repeatedly, assume all four stages are at 5,500, and, therefore, 5,500×4=22,000 total individuals with ovarian cancer would be identified per year in the U.S. The above calculation already provided the false-positive rate for the early cancer. For Stage II cancer, 84.4% would be identified in the first step, of which 84.4%×84.4%=71.2%=3,916 individuals with Stage II ovarian cancer would be verified in the second step. For Stage III and IV ovarian cancer, 94.5% would be identified in the first step, of which 94.5%×94.5%=89.3%=9,823 individuals with late ovarian cancer would be identified. This brings the total identified to 2,810+3,916+9,823=16,549 individuals out of 22,000 with ovarian cancer, for an overall sensitivity of 75.2%. Overall, the positive predictive value of such a test would be 16,549/(16,549+4,374)=79.0%. In other words, 4 in 5 women who tested positive would actually have ovarian cancer. This test would identify 6,006/11,000 or 54.6% of those individuals with early cancer, compared with the current rate of 15%.

[0357] Consider the strategy of using the 96 pan-oncology markers for detecting early colorectal cancer (FIG. 1D). The calculations are done with the anticipation of an average of 150 methylated molecules per positive marker in the blood. As described supra, assume that the average late cancer was once the average early cancer, and thus individuals with Stage I cancer would be about 40,500 individuals. Assuming individual marker false-positive rates of 3%, the first step using 96 markers (48 markers for CRC) with average sensitivities of 66%, requiring a minimum of 5 markers positive, and an overall specificity of 95.8%, the first step would identify 4,494,000 individuals (out of 107,000,000 total adults over 50 in the U.S.) with Stage I colorectal cancer. This would include, at 90.0% sensitivity, about 36,450 individuals with Stage I colorectal cancer (out of 40,500 individuals with Stage I cancer). However, those 4,494,000 presumptive positive individuals would be evaluated in a second step of 64 markers (48 markers for CRC) with average sensitivities of 66%, and requiring a minimum of 5 markers positive. The two-step test would identify 90.0%×90.0%=89.0%=32,805 individuals (out of 40,500 individuals with Stage I cancer) with colorectal cancer. With a specificity of 95.8%, the second test would also generate 4,494,000×4.2%=188,748 false-positives. The positive predictive value of such a test would be 32,805/(188,748+32,805)=14.8%. In other words, 1 in 7 individuals who tested positive would actually have Stage I colorectal cancer. In reality, one would need to also include the success for identifying Stage 2 and higher cancers. In expanding this example, the calculations are done with the anticipation that Stage I CRC has an average of 150 methylated molecules per positive marker in the blood, Stage II CRC has an average of 200 methylated molecules per positive marker, and the higher stages (III & IV) have at least an average of 300 methylated molecules per positive marker. Also, to be consistent with the idea that as the test is used repeatedly, more of early and less of late CRC will be detected, an estimate of 40,500 individuals would be identified with Stage I cancer, 40,500 individuals would be identified with Stage II cancer, and the remaining 54,000 individuals would be identified with late-stage cancer. This equals 135,000 total individuals with colorectal cancer identified per year in the U.S. The above calculation already provided the false-positive rate for the early cancer. For Stage II cancer, 98.0% would be identified in the first step, of which 98.0%×98.0%=96.0%=38,896 individuals with Stage II cancer would be verified in the second step. For Stage III and IV cancer, 99.6% would be identified in the first step, of which 99.6%×99.6%=99.2%=53,568 individuals with late cancer would be identified. This brings the total identified to 32,805+38,896+53,568=125,269 individuals out of 135,000 with colorectal cancer, for an overall sensitivity of 92.7%. Overall, the positive predictive value of such a test would be 125,269/(188,748+125,269)=39.9%. In other words, 1 in 2.5 individuals who tested positive would actually have colorectal cancer. This test would identify 71,701/81,000, or 88%, of those individuals with early cancer, compared with the current rate of 40%.

[0358] How would these results vary for using this strategy (FIG. 1F) for detection of early colorectal cancer using 50% average marker sensitivities, with the anticipation of Stage I CRC having an average of 200 methylated molecules per positive marker in the blood, Stage II CRC having an average of 240 methylated molecules per positive marker, and the higher stages (III & IV) having at least an average of 300 methylated molecules per positive marker?

[0359] Assuming individual marker false-positive rates of 3%, and with the first step using 96 markers (48 markers for CRC) with average sensitivities of 50%, requiring a minimum of 5 markers positive, then, with an overall specificity of 95.8%, the first step would identify 4,494,000 individuals (out of 107,000,000 total adults over 50 in the U.S.). This would include at 90.1% sensitivity, or about 36,490 individuals with Stage I colorectal cancer (out of 40,500 individuals with Stage I cancer). However, those 4,494,000 presumptive positive individuals would be evaluated in a second step of 48 markers (48 markers for CRC) with average sensitivities of 75%, requiring a minimum of 5 markers positive. The two-step test would identify 90.1%×99.2%=89.4%=36,198 individuals (out of 40,500 individuals with Stage I cancer) with colorectal cancer. With a specificity of 95.8%, the second test would also generate 4,494,000×4.2%=188,748 false-positives. The positive predictive value of such a test would be 36,198/(188,748+36,198)=16.1%. In other words, 1 in 6.2 individuals who tested positive would actually have Stage I colorectal cancer. In reality, one would need to also include the success for identifying Stage 2 and higher cancers. To be consistent with the idea that as the test is used repeatedly, more of early and less of late CRC will be detected, then an estimate of 40,500 individuals would have Stage I cancer, 40,500 individuals would have Stage II cancer, and the remaining 54,000 individuals would have late-stage cancer=135,000 total individuals with colorectal cancer identified per year in the U.S. The above calculation already provided the false-positive rate for the early cancer. For Stage II cancer, 97.2% would be identified in the first step, of which 97.2%×99.9%=97.1%=39,325 individuals with Stage II cancer would be verified in the second step. For Stage III and IV cancer, 99.3% would be identified in the first step, of which 99.3%×99.9%=99.2%=53,568 individuals with late cancer would be identified. This brings the total identified at 36,198+39,325+53,568=129,091 individuals out of 135,000 with colorectal cancer, for an overall sensitivity of 95.6%. Overall, the positive predictive value of such a test would be 129,091/(188,748+129,091)=40.6%, in other words, 1 in 2.5 individuals who tested positive would actually have colorectal cancer, and this test would identify 75,523/81,000 or 93.2% of those individuals with early cancer, compared with the current rate of 40%.

[0360] How would these results vary for using the second strategy (FIG. 1F) for detection of early ovarian cancer, with the anticipation of an average of 150 methylated (or hydroxymethylated) molecules per positive marker in the blood? Again, assume individuals with Stage I ovarian cancer would be about 5,500 individuals. Assuming individual marker false-positive rates of 3%, the first step using 96 markers (36 markers for ovarian) with average sensitivities of 50%, and requiring a minimum of 5 markers positive, then, with an overall specificity of 99.1%, the first step would identify 486,000 individuals (out of 54,000,000 total women ages 50-79 in the U.S.). This would include, at 46.8% sensitivity, about 2,574 individuals with Stage I ovarian cancer (out of 5,500 individuals with Stage I ovarian cancer). However, those 486,000 presumptive positive individuals would be evaluated in a second step of 48 markers (36 markers for ovarian cancer) with average sensitivities of 75%, requiring a minimum of 5 markers positive. The two-step test would identify 46.8%×80.3%=37.6%=2,068 individuals (out of 5,500 individuals with Stage I ovarian cancer) with ovarian cancer. With a specificity of 99.1%, the second test would also generate 486,000×0.9%=4,374 false-positives. The positive predictive value of such a test would be 2,068/(4,374+2,068)=32.1%. In other words, 1 in 3.1 individuals who tested positive would actually have Stage I ovarian cancer. In reality, one would need to also include the success for identifying Stage 2 and higher ovarian cancers. In expanding this example, the calculations are done with the anticipation that Stage I ovarian cancer has an average of 150 methylated (or hydroxymethylated) molecules per positive marker in the blood, Stage II ovarian cancer has an average of 200 methylated molecules per positive marker, and the higher stages (III & IV) have at least an average of 300 methylated molecules per positive marker. Also, assuming all four stages are at 5,500, then 5,500×4=22,000 total individuals with ovarian cancer would be identified per year in the U.S. The above calculation already provided the false-positive rate for the early cancer. For Stage II cancer, 71.5% would be identified in the first step, of which 71.5%×94.5%=67.6%=3,718 individuals with Stage II ovarian cancer would be verified in the second step. For Stage III and IV ovarian cancer, 94.5% would be identified in the first step, of which 94.5%×99.7%=94.2%=10,363 individuals with late ovarian cancer would be identified. This brings the total identified at 2,068+3,718+10,363=16,149 individuals out of 22,000 with ovarian cancer, for an overall sensitivity of 73.1%. Overall, the positive predictive value of such a test would be 16,149/(16,149+4,374)=78.7%. In other words, 4 in 5 women who tested positive would actually have ovarian cancer, and this test would identify 5,786/11,000 or 52.6% of those individuals with early cancer, compared with the current rate of 15%.

[0361] How would these results vary for using this strategy (FIG. 1F) for detection of early ovarian cancer using 50% average marker sensitivities, with the anticipation of Stage I CRC having an average of 200 methylated molecules per positive marker in the blood, Stage II CRC having an average of 240 methylated molecules per positive marker, and the higher stages (III & IV) having at least an average of 300 methylated molecules per positive marker?

[0362] Assuming individual marker false-positive rates of 3%, the first step using 96 markers (36 markers for Ovarian) with average sensitivities of 50%, and requiring a minimum of 5 markers positive, then, with an overall specificity of 99.1%, the first step would identify 486,000 individuals (out of 54,000,000 total women ages 50-79 in the U.S.). This would include, at 71.5% sensitivity, about 3,932 individuals with Stage I ovarian cancer (out of 5,500 individuals with Stage I ovarian cancer). However, those 486,000 presumptive positive individuals would be evaluated in a second step of 48 markers (36 markers for ovarian cancer) with average sensitivities of 75%, requiring a minimum of 5 markers positive. The two-step test would identify 71.5%×94.5%=67.6%=3,718 individuals (out of 5,500 individuals with Stage I ovarian cancer) with ovarian cancer. With a specificity of 99.1%, the second test would also generate 486,000×0.9%=4,374 false-positives. The positive predictive value of such a test would be 3,718/(4,374+3,718)=45.9%. In other words, 1 in 2.2 individuals who tested positive would actually have Stage I ovarian cancer. In reality, one would need to also include the success for identifying Stage 2 and higher ovarian cancers. Assuming all four stages are at 5,500, then 5,500×4=22,000 total individuals with ovarian cancer would be identified per year in the U.S. The above calculation already provided the false-positive rate for the early cancer. For Stage II cancer, 84.4% would be identified in the first step, of which 84.4%×98.3%=82.9%=4,559 individuals with Stage II ovarian cancer would be verified in the second step. For Stage III and IV ovarian cancer, 94.5% would be identified in the first step, of which 94.5%×99.7%=94.2%=10,363 individuals with late ovarian cancer would be identified. This brings the total identified at 3,718+4,559+10,363=18,640 individuals out of 22,000 with ovarian cancer, for an overall sensitivity of 84.7%. Overall, the positive predictive value of such a test would be 18,640/(18,640+4,374)=81.0%. In other words, 4 in 5 women who tested positive would actually have ovarian cancer, and this test would identify 8,277/11,000 or 75.2% of those individuals with early cancer, compared with the current rate of 15%.

[0363] Finally, consider the third strategy using the 64 pan-oncology markers of detecting early colorectal cancer (FIG. 1H). The calculations are done with the anticipation of an average of 150 methylated (or hydroxymethylated) molecules per positive marker in the blood. As before, assume that the average late cancer was once the average early cancer, and thus individuals with Stage I cancer would be about 40,500 individuals. Assuming individual marker false-positive rates of 3%, the first step using 64 markers (48 markers for CRC) with average sensitivities of 75%, and requiring a minimum of 5 markers positive, then, with an overall specificity of 95.8%, the first step would identify 4,494,000 individuals (out of 107,000,000 total adults over 50 in the U.S.). This would include, at 94.5% sensitivity, about 38,272 individuals with Stage I colorectal cancer (out of 40,500 individuals with Stage I cancer). However, those 4,494,000 presumptive positive individuals would be evaluated in a second step of 96 markers (48 markers for CRC) with average sensitivities of 50%, requiring a minimum of 5 markers positive. The two-step test would identify 94.5%×71.6%=67.6%=27,403 individuals (out of 40,500 individuals with Stage I cancer) with colorectal cancer. With a specificity of 95.8%, the second test would also generate 4,494,000×4.2%=188,748 false-positives. The positive predictive value of such a test would be 27,403/(188,748+27,403)=12.6%. In other words, 1 in 8 individuals who tested positive would actually have Stage I colorectal cancer. In reality, one would need to also include the success for identifying Stage 2 and higher cancers. In expanding this example, the calculations are done with the anticipation that Stage I CRC has an average of 150 methylated (or hydroxymethylated) molecules per positive marker in the blood, Stage II CRC has an average of 200 methylated molecules per positive marker, and the higher stages (III & IV) have at least an average of 300 methylated molecules per positive marker. Also, to be consistent with the idea that, as the test is used repeatedly, more of early and less of late CRC will be detected, then an estimate of 40,500 individuals with Stage I cancer would be identified, 40,500 individuals with Stage II cancer would be identified, and the remaining 54,000 individuals would have late-stage cancer=135,000 total individuals with colorectal cancer identified per year in the U.S. The above calculation already provided the false-positive rate for the early cancer. For Stage II cancer, 99.2% would be identified in the first step, of which 99.2%×90.1%=89.3%=36,198 individuals with Stage II cancer would be verified in the second step. For Stage III and IV cancer, 99.9% would be identified in the first step, of which 99.9%×99.3%=99.2%=53,568 individuals with late cancer would be identified. This brings the total identified at 27,403+36,198+53,568=117,169 individuals out of 135,000 with colorectal cancer, for an overall sensitivity of 87%. Overall, the positive predictive value of such a test would be 117,169/(188,748+117,169)=38.3%. In other words, 2 in 5 individuals who tested positive would actually have colorectal cancer, and this test would identify 63,601/81,000 or 78.5% of those individuals with early cancer, compared with the current rate of 40%.

[0364] How would these results vary for using this strategy (FIG. 1H) for detection of early colorectal cancer using 75% average marker sensitivities, with the anticipation of Stage I CRC having an average of 200 methylated molecules per positive marker in the blood, Stage II CRC having an average of 240 methylated molecules per positive marker, and the higher stages (III & IV) having at least an average of 300 methylated molecules per positive marker?

[0365] Assuming individual marker false-positive rates of 3%, the first step using 64 markers (48 markers for CRC) with average sensitivities of 75%, and requiring a minimum of 5 markers positive, then, with an overall specificity of 95.8%, the first step would identify 4,494,000 individuals (out of 107,000,000 total adults over 50 in the U.S.). This would include, at 99.2% sensitivity, about 40,176 individuals with Stage I colorectal cancer (out of 40,500 individuals with Stage I cancer). However, those 4,494,000 presumptive positive individuals would be evaluated in a second step of 96 markers (48 markers for CRC) with average sensitivities of 50%, requiring a minimum of 5 markers positive. The two-step test would identify 99.2%×90.1%=89.3%=36,198 individuals (out of 40,500 individuals with Stage I cancer) with colorectal cancer. With a specificity of 95.8%, the second test would also generate 4,494,000×4.2%=188,748 false-positives. The positive predictive value of such a test would be 36,198/(188,748+36,198)=16.1%. In other words, 1 in 6.2 individuals who tested positive would actually have Stage I colorectal cancer. In reality, one would need to also include the success for identifying Stage 2 and higher cancers. To be consistent with the idea that as the test is used repeatedly, more of early and less of late CRC will be detected, then an estimate of 40,500 individuals would have Stage I cancer, 40,500 individuals would have Stage II cancer, and the remaining 54,000 individuals would have late-stage cancer=135,000 total individuals with colorectal cancer identified per year in the U.S. The above calculation already provided the false-positive rate for the early cancer. For Stage II cancer, 99.9% would be identified in the first step, of which 99.9%×97.2%=97.1%=39,325 individuals with Stage II cancer would be verified in the second step. For Stage III and IV cancer, 99.9% would be identified in the first step, of which 99.9%×99.3%=99.2%=53,568 individuals with late cancer would be identified. This brings the total identified at 36,198+39,325+53,568=129,091 individuals out of 135,000 with colorectal cancer, for an overall sensitivity of 95.6%. Overall, the positive predictive value of such a test would be 129,091/(188,748+129,091)=40.6%. In other words, 1 in 2.5 individuals who tested positive would actually have colorectal cancer, and this test would identify 75,523/81,000 or 93.2% of those individuals with early cancer, compared with the current rate of 40%.

[0366] How would these results vary for using the third strategy (FIG. 1H) for detection of early ovarian cancer, with the anticipation of an average of 150 methylated (or hydroxymethylated) molecules per positive marker in the blood? Again, assume individuals with Stage I ovarian cancer would be about 4,500 individuals. Assuming individual marker false-positive rates of 3%, and the first step using 64 markers (36 markers for ovarian) with average sensitivities of 75%, and requiring a minimum of 5 markers positive, then, with an overall specificity of 99.1%, the first step would identify 486,000 individuals (out of 54,000,000 total women ages 50-79 in the U.S.). This would include, at 80.3% sensitivity, about 4,416 individuals with Stage I ovarian cancer (out of 5,500 individuals with Stage I ovarian cancer). However, those 486,000 presumptive positive individuals would be evaluated in a second step of 96 markers (36 markers for ovarian cancer) with average sensitivities of 50%, requiring a minimum of 5 markers positive. The two-step test would identify 80.3%×46.8%=37.6%=2,068 individuals (out of 5,500 individuals with Stage I ovarian cancer) with ovarian cancer. With a specificity of 99.1%, the second test would also generate 486,000×0.9%=4,374 false-positives. The positive predictive value of such a test would be 2,068/(4,374+2,068)=32.1%. In other words, 1 in 3.1 individuals who tested positive would actually have Stage I ovarian cancer. In reality, one would need to also include the success for identifying Stage 2 and higher ovarian cancers. In expanding this example, the calculations are done with the anticipation that Stage I ovarian cancer has an average of 150 methylated (or hydroxymethylated) molecules per positive marker in the blood, Stage II ovarian cancer has an average of 200 methylated molecules per positive marker, and the higher stages (III & IV) have at least an average of 300 methylated molecules per positive marker. Also, assume all four stages are at 5,500, then 5,500×4=22,000 total individuals with ovarian cancer would be identified per year in the U.S. The above calculation already provided the false-positive rate for the early cancer. For Stage II cancer, 94.5% would be identified in the first step, of which 94.5%×71.5%=67.6%=3,718 individuals with Stage II ovarian cancer would be verified in the second step. For Stage III and IV ovarian cancer, 99.7% would be identified in the first step, of which 99.7%×94.5%=94.2%=10,363 individuals with late ovarian cancer would be identified. This brings the total identified at 2,068+3,718+10,363=16,149 individuals out of 22,000 with ovarian cancer, for an overall sensitivity of 73.1%. Overall, the positive predictive value of such a test would be 16,149/(16,149+4,374)=78.7%. In other words, 4 in 5 women who tested positive would actually have ovarian cancer, and this test would identify 5,786/11,000 or 52.6% of those individuals with early cancer, compared with the current rate of 15%.

[0367] How would these results vary for using this strategy (FIG. 1H)) for detection of early ovarian cancer using 75% average marker sensitivities, with the anticipation of Stage I CRC having an average of 200 methylated molecules per positive marker in the blood, Stage II CRC having an average of 240 methylated molecules per positive marker, and the higher stages (III & IV) having at least an average of 300 methylated molecules per positive marker?

[0368] Assuming individual marker false-positive rates of 3%, the first step using 64 markers (36 markers for ovarian) with average sensitivities of 75%, and requiring a minimum of 5 markers positive, then, with an overall specificity of 99.1%, the first step would identify 486,000 individuals (out of 54,000,000 total women ages 50-79 in the U.S.). This would include, at 94.5% sensitivity, about 5,197 individuals with Stage I ovarian cancer (out of 5,500 individuals with Stage I ovarian cancer). However, those 486,000 presumptive positive individuals would be evaluated in a second step of 96 markers (36 markers for ovarian cancer) with average sensitivities of 50%, requiring a minimum of 5 markers positive. The two-step test would identify 94.5%×71.5%=67.6%=3,718 individuals (out of 5,500 individuals with Stage I ovarian cancer) with ovarian cancer. With a specificity of 99.1%, the second test would also generate 486,000×0.9%=4,374 false-positives. The positive predictive value of such a test would be 3,718/(4,374+3,718)=45.9%. In other words, 1 in 2.2 individuals who tested positive would actually have Stage I ovarian cancer. In reality, one would need to also include the success for identifying Stage 2 and higher ovarian cancers. Also, assume all four stages are at 5,500, then 5,500×4=22,000 total individuals with ovarian cancer would be identified per year in the U.S. The above calculation already provided the false-positive rate for the early cancer. For Stage II cancer, 84.4% would be identified in the first step, of which 98.3%×84.4%=82.9%=4,559 individuals with Stage II ovarian cancer would be verified in the second step. For Stage III and IV ovarian cancer, 94.5% would be identified in the first step, of which 99.7%×94.5%=94.2%=10,363 individuals with late ovarian cancer would be identified. This brings the total identified at 3,718+4,559+10,363=18,640 individuals out of 22,000 with ovarian cancer, for an overall sensitivity of 84.7%. Overall, the positive predictive value of such a test would be 18,640/(18,640+4,374)=81.0%. In other words, 4 in 5 women who tested positive would actually have ovarian cancer, and this test would identify 8,277/11,000 or 75.2% of those individuals with early cancer, compared with the current rate of 15%.

[0369] The above calculations worked under the assumption of limiting at least one set of markers to an average of 50% sensitivities. How would the results improve if the average of 50% sensitivities was improved to 66% sensitivities?

[0370] Consider the first strategy using the 96 pan-oncology markers of detecting early colorectal cancer (FIG. 14 The calculations are done with the anticipation of an average of 150 methylated (or hydroxymethylated) molecules per positive marker in the blood. As previously, assume that the average late cancer was once the average early cancer, and thus individuals with Stage I cancer would be about 40,500 individuals. Assuming individual marker false-positive rates of 3%, the first step using 96 markers (48 markers for CRC) with average sensitivities of 66%, and requiring a minimum of 5 markers positive, then, with an overall specificity of 95.8%, the first step would identify 4,494,000 individuals (out of 107,000,000 total adults over 50 in the U.S.). This would include, at 90.0% sensitivity, about 36,450 individuals with Stage I colorectal cancer (out of 40,500 individuals with Stage I cancer). However, those 4,494,000 presumptive positive individuals would be evaluated in a second step of 64 markers (48 markers for CRC) with average sensitivities of 66%, requiring a minimum of 5 markers positive. The two-step test would identify 90.0%×90.0%=89.0%=32,805 individuals (out of 40,500 individuals with Stage I cancer) with colorectal cancer. With a specificity of 95.8%, the second test would also generate 4,494,000×4.2%=188,748 false-positives. The positive predictive value of such a test would be 32,805/(188,748+32,805)=14.8%. In other words, 1 in 7 individuals who tested positive would actually have Stage I colorectal cancer. In reality, one would need to also include the success for identifying Stage 2 and higher cancers. In expanding this example, the calculations are done with the anticipation that Stage I CRC has an average of 150 methylated (or hydroxymethylated) molecules per positive marker in the blood, Stage II CRC has an average of 200 methylated molecules per positive marker, and the higher stages (III & IV) have at least an average of 300 methylated molecules per positive marker. Also, to be consistent with the idea that as the test is used repeatedly, more of early and less of late CRC will be detected, then an estimate of 40,500 individuals would be identified with Stage I cancer, 40,500 individuals would be identified with Stage II cancer, and the remaining 54,000 individuals would have late-stage cancer=135,000 total individuals with colorectal cancer identified per year in the U.S. The above calculation already provided the false-positive rate for the early cancer. For Stage II cancer, 98.0% would be identified in the first step, of which 98.0%×98.0%=96.0%=38,896 individuals with Stage II cancer would be verified in the second step. For Stage III and IV cancer, 99.6% would be identified in the first step, of which 99.6%×99.6%=99.2%=53,568 individuals with late cancer would be identified. This brings the total identified at 32,805+38,896+53,568=125,269 individuals out of 135,000 with colorectal cancer, for an overall sensitivity of 92.7%. Overall, the positive predictive value of such a test would be 125,269/(188,748+125,269)=39.9%. In other words, 1 in 2.5 individuals who tested positive would actually have colorectal cancer, and this test would identify 71,701/81,000 or 88% of those individuals with early cancer, compared with the current rate of 40%.

[0371] How would these results vary for using this strategy (FIG. 1I) for detection of early colorectal cancer using 66% average marker sensitivities, with the anticipation that Stage I CRC has an average of 200 methylated molecules per positive marker in the blood, Stage II CRC has an average of 240 methylated molecules per positive marker, and the higher stages (III & IV) have at least an average of 300 methylated molecules per positive marker?

[0372] Assuming individual marker false-positive rates of 3%, the first step using 96 markers (48 markers for CRC) with average sensitivities of 66%, and requiring a minimum of 5 markers positive, then, with an overall specificity of 95.8%, the first step would identify 4,494,000 individuals (out of 107,000,000 total adults over 50 in the U.S). This would include, at 98.0% sensitivity, about 39,690 individuals with Stage I colorectal cancer (out of 40,500 individuals with Stage I cancer). However, those 4,494,000 presumptive positive individuals would be evaluated in a second step of 64 markers (48 markers for CRC) with average sensitivities of 66%, requiring a minimum of 5 markers positive. The two-step test would identify 98.0%×98.0%=96.0%=38,896 individuals (out of 40,500 individuals with Stage I cancer) with colorectal cancer. With a specificity of 95.8%, the second test would also generate 4,494,000×4.2%=188,748 false-positives. The positive predictive value of such a test would be 38,896/(188,748+38,896)=17.81%. In other words, 1 in 6 individuals who tested positive would actually have Stage I colorectal cancer. In reality, one would need to also include the success for identifying Stage 2 and higher cancers. To be consistent with the idea that as the test is used repeatedly, more of early and less of late CRC will be detected, then an estimate of 40,500 individuals would be identified with Stage I cancer, 40,500 individuals would be identified with Stage II cancer, and the remaining 54,000 individuals would have late-stage cancer=135,000 total individuals with colorectal cancer identified per year in the U.S. The above calculation already provided the false-positive rate for the early cancer. For Stage II cancer, 98.0% would be identified in the first step, of which 99.6%×99.6%=99.2%=40,176 individuals with Stage II cancer would be verified in the second step. For Stage III and IV cancer, 99.9% would be identified in the first step, of which 99.9%×99.9%=99.8%=53,568 individuals with late cancer would be identified. This brings the total identified at 38,896+40,176+53,892=132,964 individuals out of 135,000 with colorectal cancer, for an overall sensitivity of 98.5%. Overall, the positive predictive value of such a test would be 132,964/(188,748+132,964)=41.3%. In other words, 1 in 2.5 individuals who tested positive would actually have colorectal cancer, and this test would identify 79,072/81,000 or 97.6% of those individuals with early cancer, compared with the current rate of 40%.

[0373] How would these results vary for using the first strategy (FIG. 1I) for detection of early ovarian cancer, with the anticipation of an average of 150 methylated (or hydroxymethylated) molecules per positive marker in the blood? Again, assume that the stages are evenly divided, and thus individuals with Stage I ovarian cancer would be about 5,500 individuals. Assuming individual marker false-positive rates of 3%, the first step using 96 markers (36 markers for ovarian) with average sensitivities of 66%, and requiring a minimum of 5 markers positive, then, with an overall specificity of 99.1%, the first step would identify 486,000 individuals (out of 54,000,000 total women ages 50-79 in the U.S). This would include, at 71.5% sensitivity, about 3,932 individuals with Stage I ovarian cancer (out of 5,500 individuals with Stage I ovarian cancer). However, those 486,000 presumptive positive individuals would be evaluated in a second step of 64 markers (36 markers for ovarian cancer) with average sensitivities of 66%, requiring a minimum of 5 markers positive. The two-step test would identify 71.5%×71.5%=51.1%=2,810 individuals (out of 5,500 individuals with Stage I ovarian cancer) with ovarian cancer. With a specificity of 99.1%, the second test would also generate 486,000×0.9%=4,374 false-positives. The positive predictive value of such a test would be 2,810/(4,374+2,810)=39.1%. In other words, 1 in 2.5 individuals who tested positive would actually have Stage I ovarian cancer. In reality, one would need to also include the success for identifying Stage 2 and higher ovarian cancers. In expanding this example, the calculations are done with the anticipation that Stage I ovarian cancer has an average of 150 methylated molecules per positive marker in the blood, Stage II ovarian cancer has an average of 200 methylated molecules per positive marker, and the higher stages (III & IV) have at least an average of 300 methylated molecules per positive marker. Also, assume all four stages are at 5,500, then 5,500×4=22,000 total individuals with ovarian cancer would be identified per year in the U.S. The above calculation already provided the false-positive rate for the early cancer. For Stage II cancer, 90.0% would be identified in the first step, of which 90.0%×90.0%=81.0%=4,485 individuals with Stage II ovarian cancer would be verified in the second step. For Stage III and IV ovarian cancer, 99.2% would be identified in the first step, of which 99.2%×99.2%=98.4%=10,824 individuals with late ovarian cancer would be identified. This brings the total identified at 2,810+4,485+10,824=18,119 individuals out of 22,000 with ovarian cancer, for an overall sensitivity of 82.4%. Overall, the positive predictive value of such a test would be 18,119/(18,119+4,374)=80.5%. In other words, 4 in 5 women who tested positive would actually have ovarian cancer, and this test would identify 7,295/11,000 or 66.3% of those individuals with early cancer, compared with the current rate of 15%.

[0374] How would these results vary for using this strategy (FIG. 1I) for detection of early ovarian cancer using 66% average marker sensitivities, with the anticipation that Stage I ovarian cancer has an average of 200 methylated molecules per positive marker in the blood, Stage II ovarian cancer has an average of 240 methylated molecules per positive marker, and the higher stages (III & IV) have at least an average of 300 methylated molecules per positive marker?

[0375] Assuming individual marker false-positive rates of 3%, the first step using 96 markers (36 markers for ovarian) with average sensitivities of 66%, and requiring a minimum of 5 markers positive, then, with an overall specificity of 99.1%, the first step would identify 486,000 individuals (out of 54,000,000 total women ages 50-79 in the U.S). This would include, at 90.0% sensitivity, about 4,950 individuals with Stage I ovarian cancer (out of 5,500 individuals with Stage I ovarian cancer). However, those 486,000 presumptive positive individuals would be evaluated in a second step of 64 markers (36 markers for ovarian cancer) with average sensitivities of 66%, requiring a minimum of 5 markers positive. The two-step test would identify 90.0%×90.0%=81.0%=4,895 individuals (out of 5,500 individuals with Stage I ovarian cancer) with ovarian cancer. With a specificity of 99.1%, the second test would also generate 486,000×0.9%=4,374 false-positives. The positive predictive value of such a test would be 4,895/(4,374+4,895)=52.8%. In other words, 1 in 2 individuals who tested positive would actually have Stage I ovarian cancer. In reality, one would need to also include the success for identifying Stage 2 and higher ovarian cancers. Also, assume all four stages are at 5,500, then 5,500×4=22,000 total individuals with ovarian cancer would be identified per year in the U.S. The above calculation already provided the false-positive rate for the early cancer. For Stage II cancer, 96.2% would be identified in the first step, of which 96.2%×96.2%=92.5%=5,087 individuals with Stage II ovarian cancer would be verified in the second step. For Stage III and IV ovarian cancer, 99.2% would be identified in the first step, of which 99.2%×99.2%=98.4%=10,824 individuals with late ovarian cancer would be identified. This brings the total identified at 4,895+5087+10,824=20,806 individuals out of 22,000 with ovarian cancer, for an overall sensitivity of 94.6%. Overall, the positive predictive value of such a test would be 20,806/(20,806+4,374)=87.4%. In other words, 7 in 8 women who tested positive would actually have ovarian cancer, and this test would identify 9,982/11,000 or 90.1% of those individuals with early cancer, compared with the current rate of 15%.

[0376] Consider the second strategy using the 96 pan-oncology markers of detecting early colorectal cancer (FIG. 1J). The calculations are done with the anticipation of an average of 150 methylated (or hydroxymethylated) molecules per positive marker in the blood. As before, assume that the average late cancer was once the average early cancer, and thus individuals with Stage I cancer would be about 40,500 individuals. Assuming individual marker false-positive rates of 3%, the first step using 96 markers (48 markers for CRC) with average sensitivities of 66%, and requiring a minimum of 5 markers positive, then, with an overall specificity of 95.8%, the first step would identify 4,494,000 individuals (out of 107,000,000 total adults over 50 in the U.S). This would include, at 90.0% sensitivity, about 36,450 individuals with Stage I colorectal cancer (out of 40,500 individuals with Stage I cancer). However, those 4,494,000 presumptive positive individuals would be evaluated in a second step of 48 markers (48 markers for CRC) with average sensitivities of 75%, requiring a minimum of 5 markers positive. The two-step test would identify 90.0%×94.5%=85.0%=34,445 individuals (out of 40,500 individuals with Stage I cancer) with colorectal cancer. With a specificity of 95.8%, the second test would also generate 4,494,000×4.2%=188,748 false-positives. The positive predictive value of such a test would be 34,445/(188,748+34,445)=15.4%. In other words, 1 in 6.5 individuals who tested positive would actually have Stage I colorectal cancer. In reality, one would need to also include the success for identifying Stage 2 and higher cancers. In expanding this example, the calculations are done with the anticipation that Stage I CRC has an average of 150 methylated (or hydroxymethylated) molecules per positive marker in the blood, Stage II CRC has an average of 200 methylated molecules per positive marker, and the higher stages (III & IV) have at least an average of 300 methylated molecules per positive marker. Also, to be consistent with the idea that as the test is used repeatedly, more of early and less of late CRC will be detected, then an estimate of 40,500 individuals with Stage I cancer, 40,500 individuals with Stage II cancer, and the remaining 54,000 individuals have late-stage cancer=135,000 total individuals with colorectal cancer identified per year in the U.S. The above calculation already provided the false-positive rate for the early cancer. For Stage II cancer, 98.0% would be identified in the first step, of which 98.1%×99.2%=97.3%=39,412 individuals with Stage II cancer would be verified in the second step. For Stage III and IV cancer, 99.9% would be identified in the first step, of which 99.9%×99.9%=99.8%=53,892 individuals with late cancer would be identified. This brings the total identified at 34,445+39,412+53,892=127,749 individuals out of 135,000 with colorectal cancer, for an overall sensitivity of 94.6%. Overall, the positive predictive value of such a test would be 127,749/(188,748+127,749)=40.3%. In other words, 1 in 2.5 individuals who tested positive would actually have colorectal cancer, and this test would identify 73,857/81,000 or 91.2% of those individuals with early cancer, compared with the current rate of 40%.

[0377] How would these results vary for using this strategy (FIG. 1J) for detection of early colorectal cancer using 66% average marker sensitivities, with the anticipation that Stage I CRC has an average of 200 methylated molecules per positive marker in the blood, Stage II CRC has an average of 240 methylated molecules per positive marker, and the higher stages (III & IV) have at least an average of 300 methylated molecules per positive marker?

[0378] Assuming individual marker false-positive rates of 3%, the first step using 96 markers (48 markers for CRC) with average sensitivities of 66%, and requiring a minimum of 5 markers positive, then, with an overall specificity of 95.8%, the first step would identify 4,494,000 individuals (out of 107,000,000 total adults over 50 in the U.S). This would include, at 98.0% sensitivity, about 39,690 individuals with Stage I colorectal cancer (out of 40,500 individuals with Stage I cancer). However, those 4,494,000 presumptive positive individuals would be evaluated in a second step of 48 markers (48 markers for CRC) with average sensitivities of 75%, requiring a minimum of 5 markers positive. The two-step test would identify 98.0%×99.2%=97.2%=39,372 individuals (out of 40,500 individuals with Stage I cancer) with colorectal cancer. With a specificity of 95.8%, the second test would also generate 4,494,000×4.2%=188,748 false-positives. The positive predictive value of such a test would be 39,372/(188,748+39,372)=17.2%. In other words, 1 in 5.8 individuals who tested positive would actually have Stage I colorectal cancer. In reality, one would need to also include the success for identifying Stage 2 and higher cancers. To be consistent with the idea that as the test is used repeatedly, more of early and less of late CRC will be detected, then an estimate of 40,500 individuals would be identified with Stage I cancer, 40,500 individuals would be identified with Stage II cancer, and the remaining 54,000 individuals would have late-stage cancer=135,000 total individuals with colorectal cancer identified per year in the U.S. The above calculation already provided the false-positive rate for the early cancer. For Stage II cancer, 99.6% would be identified in the first step, of which 99.6%×99.9%=99.5%=40,297 individuals with Stage II cancer would be verified in the second step. For Stage III and IV cancer, 99.9% would be identified in the first step, of which 99.9%×99.9%=99.8%=53,892 individuals with late cancer would be identified. This brings the total identified at 39,372+40,297+53,892=133,561 individuals out of 135,000 with colorectal cancer, for an overall sensitivity of 98.9%. Overall, the positive predictive value of such a test would be 133,561/(188,748+133,561)=41.4%. In other words, 1 in 2.4 individuals who tested positive would actually have colorectal cancer, and this test would identify 79,699/81,000 or 98.4% of those individuals with early cancer, compared with the current rate of 40%.

[0379] How would these results vary for using the second strategy (FIG. 1J) for detection of early ovarian cancer, with the anticipation of an average of 150 methylated (or hydroxymethylated) molecules per positive marker in the blood? Again, assume individuals with Stage I ovarian cancer would be about 5,500 individuals. Assuming individual marker false-positive rates of 3%, the first step using 96 markers (36 markers for Ovarian) with average sensitivities of 66%, and requiring a minimum of 5 markers positive, then, with an overall specificity of 99.1%, the first step would identify 486,000 individuals (out of 54,000,000 total women ages 50-79 in the U.S). This would include, at 71.5% sensitivity, about 3,932 individuals with Stage I ovarian cancer (out of 5,500 individuals with Stage I ovarian cancer). However, those 486,000 presumptive positive individuals would be evaluated in a second step of 48 markers (36 markers for ovarian cancer) with average sensitivities of 75%, requiring a minimum of 5 markers positive. The two-step test would identify 71.5%×80.3%=57.4%=3,157 individuals (out of 5,500 individuals with Stage I ovarian cancer) with ovarian cancer. With a specificity of 99.1%, the second test would also generate 486,000×0.9%=4,374 false-positives. The positive predictive value of such a test would be 3,157/(4,374+3,157)=41.9%. In other words, 1 in 2.4 individuals who tested positive would actually have Stage I ovarian cancer. In reality, one would need to also include the success for identifying Stage 2 and higher ovarian cancers. In expanding this example, the calculations are done with the anticipation that Stage I ovarian cancer has an average of 150 methylated (or hydroxymethylated) molecules per positive marker in the blood, Stage II ovarian cancer has an average of 200 methylated molecules per positive marker, and the higher stages (III & IV) have at least an average of 300 methylated molecules per positive marker. Also, assume all four stages are at 5,500, then 5,500×4=22,000 total individuals with ovarian cancer identified per year in the U.S. The above calculation already provided the false-positive rate for the early cancer. For Stage II cancer, 90.0% would be identified in the first step, of which 90.0%×94.5%=85%=4,675 individuals with Stage II ovarian cancer would be verified in the second step. For Stage III and IV ovarian cancer, 99.2% would be identified in the first step, of which 99.2%×99.7%=98.9%=10,879 individuals with late ovarian cancer would be identified. This brings the total identified at 3,157+4,675+10,879=18,711 individuals out of 22,000 with ovarian cancer, for an overall sensitivity of 85.1%. Overall, the positive predictive value of such a test would be 18,711/(18,711+4,374)=81.1%. In other words, 4 in 5 women who tested positive would actually have ovarian cancer, and this test would identify 7,832/11,000 or 71.2% of those individuals with early cancer, compared with the current rate of 15%.

[0380] How would these results vary for using this strategy (FIG. 1F) for detection of early ovarian cancer using 66% average marker sensitivities, with the anticipation that Stage I CRC has an average of 200 methylated molecules per positive marker in the blood, Stage II CRC has an average of 240 methylated molecules per positive marker, and the higher stages (III & IV) have at least an average of 300 methylated molecules per positive marker?

[0381] Assuming individual marker false-positive rates of 3%, the first step using 96 markers (36 markers for ovarian) with average sensitivities of 66%, and requiring a minimum of 5 markers positive, then, with an overall specificity of 99.1%, the first step would identify 486,000 individuals (out of 54,000,000 total women ages 50-79 in the U.S). This would include, at 90.0% sensitivity, about 4,950 individuals with Stage I ovarian cancer (out of 5,500 individuals with Stage I ovarian cancer). However, those 486,000 presumptive positive individuals would be evaluated in a second step of 48 markers (36 markers for ovarian cancer) with average sensitivities of 75%, requiring a minimum of 5 markers positive. The two-step test would identify 90.0%×94.5%=85%=4,675 individuals (out of 5,500 individuals with Stage I ovarian cancer) with ovarian cancer. With a specificity of 99.1%, the second test would also generate 486,000×0.9%=4,374 false-positives. The positive predictive value of such a test would be 4,675/(4,374+4,675)=51.6%. In other words, 1 in 2 individuals who tested positive would actually have Stage I ovarian cancer. In reality, one would need to also include the success for identifying Stage 2 and higher ovarian cancers. Also, assume all four stages are at 5,500, then 5,500×4=22,000 total individuals with ovarian cancer would be identified per year in the U.S. The above calculation already provided the false-positive rate for the early cancer. For Stage II cancer, 96.2% would be identified in the first step, of which 96.2%×98.3%=94.5%=5,201 individuals with Stage II ovarian cancer would be verified in the second step. For Stage III and IV ovarian cancer, 99.2% would be identified in the first step, of which 99.2%×99.7%=98.9%=10,879 individuals with late ovarian cancer would be identified. This brings the total identified at 4,675+5,201+10,879=20,755 individuals out of 22,000 with ovarian cancer, for an overall sensitivity of 94.3%. Overall, the positive predictive value of such a test would be 20,755/(20,755+4,374)=82.6%. In other words, 4 in 5 women who tested positive would actually have ovarian cancer, and this test would identify 9,876/11,000 or 89.8% of those individuals with early cancer, compared with the current rate of 15%.

[0382] Finally, consider the third strategy using the 64 pan-oncology markers of detecting early colorectal cancer (FIG. 1L). The calculations are done with the anticipation of an average of 150 methylated (or hydroxymethylated) molecules per positive marker in the blood. As before, assume that the average late cancer was once the average early cancer, and thus individuals with Stage I cancer would be about 40,500 individuals. Assuming individual marker false-positive rates of 3%, the first step using 64 markers (48 markers for CRC) with average sensitivities of 75%, and requiring a minimum of 5 markers positive, then, with an overall specificity of 95.8%, the first step would identify 4,494,000 individuals (out of 107,000,000 total adults over 50 in the U.S). This would include, at 94.5% sensitivity, about 38,272 individuals with Stage I colorectal cancer (out of 40,500 individuals with Stage I cancer). However, those 4,494,000 presumptive positive individuals would be evaluated in a second step of 96 markers (48 markers for CRC) with average sensitivities of 66%, requiring a minimum of 5 markers positive. The two-step test would identify 94.5%×90.0%=85.0%=34,445 individuals (out of 40,500 individuals with Stage I cancer) with colorectal cancer. With a specificity of 95.8%, the second test would also generate 4,494,000×4.2%=188,748 false-positives. The positive predictive value of such a test would be 34,445/(188,748+34,445)=15.4%. In other words, 1 in 6.5 individuals who tested positive would actually have Stage I colorectal cancer. In reality, one would need to also include the success for identifying Stage 2 and higher cancers. In expanding this example, the calculations are done with the anticipation that Stage I CRC has an average of 150 methylated (or hydroxymethylated) molecules per positive marker in the blood, Stage II CRC has an average of 200 methylated molecules per positive marker, and the higher stages (III & IV) have at least an average of 300 methylated molecules per positive marker. Also, to be consistent with the idea that as the test is used repeatedly, more of early and less of late CRC will be detected, then an estimate of 40,500 individuals would be identified with Stage I cancer, 40,500 individuals would be identified with Stage II cancer, and the remaining 54,000 individuals would have late-stage cancer=135,000 total individuals with colorectal cancer identified per year in the U.S. The above calculation already provided the false-positive rate for the early cancer. For Stage II cancer, 99.2% would be identified in the first step, of which 99.2%×98.1%=97.3%=39,412 individuals with Stage II cancer would be verified in the second step. For Stage III and IV cancer, 99.9% would be identified in the first step, of which 99.9%×99.9%=99.8%=53,892 individuals with late cancer would be identified. This brings the total identified at 34,445+39,412+53,892=127,749 individuals out of 135,000 with colorectal cancer, for an overall sensitivity of 94.6%. Overall, the positive predictive value of such a test would be 127,749/(188,748+127,749)=40.3%. In other words, 1 in 2.5 individuals who tested positive would actually have colorectal cancer, and this test would identify 73,857/81,000 or 91.2% of those individuals with early cancer, compared with the current rate of 40%.

[0383] How would these results vary for using this strategy (FIG. 1L) for detection of early colorectal cancer using 75% average marker sensitivities, with the anticipation that Stage I CRC has an average of 200 methylated molecules per positive marker in the blood, Stage II CRC has an average of 240 methylated molecules per positive marker, and the higher stages (III & IV) have at least an average of 300 methylated molecules per positive marker?

[0384] Assuming individual marker false-positive rates of 3%, the first step using 64 markers (48 markers for CRC) with average sensitivities of 75%, and requiring a minimum of 5 markers positive, then, with an overall specificity of 95.8%, the first step would identify 4,494,000 individuals (out of 107,000,000 total adults over 50 in the US). This would include, at 99.2% sensitivity, about 40,176 individuals with Stage I colorectal cancer (out of 40,500 individuals with Stage I cancer). However, those 4,494,000 presumptive positive individuals would be evaluated in a second step of 96 markers (48 markers for CRC) with average sensitivities of 66%, requiring a minimum of 5 markers positive. The two-step test would identify 99.2%×98.0%=97.2%=39,372 individuals (out of 40,500 individuals with Stage I cancer) with colorectal cancer. With a specificity of 95.8%, the second test would also generate 4,494,000×4.2%=188,748 false-positives. The positive predictive value of such a test would be 39,372/(188,748+39,372)=17.2%. In other words, 1 in 5.8 individuals who tested positive would actually have Stage I colorectal cancer. In reality, one would need to also include the success for identifying Stage 2 and higher cancers. To be consistent with the idea that as the test is used repeatedly, more of early and less of late CRC will be detected, then an estimate of 40,500 individuals would be identified with Stage I cancer, 40,500 individuals would be identified with Stage II cancer, and the remaining 54,000 individuals would have late-stage cancer=135,000 total individuals with colorectal cancer identified per year in the U.S. The above calculation already provided the false-positive rate for the early cancer. For Stage II cancer, 99.9% would be identified in the first step, of which 99.9%×99.6%=99.5%=40,297 individuals with Stage II cancer would be verified in the second step. For Stage III and IV cancer, 99.9% would be identified in the first step, of which 99.9%×99.9%=99.8%=53,892 individuals with late cancer would be identified. This brings the total identified at 39,372+40,297+53,892=133,561 individuals out of 135,000 with colorectal cancer, for an overall sensitivity of 98.9%. Overall, the positive predictive value of such a test would be 133,561/(188,748+133,561)=41.4%. In other words, 1 in 2.4 individuals who tested positive would actually have colorectal cancer, and this test would identify 79,699/81,000 or 98.4% of those individuals with early cancer, compared with the current rate of 40%.

[0385] How would these results vary for using the third strategy (FIG. 1L) for detection of early ovarian cancer, with the anticipation of an average of 150 methylated (or hydroxymethylated) molecules per positive marker in the blood? Again, assume individuals with Stage I ovarian cancer would be about 5,500 individuals. Assuming individual marker false-positive rates of 3%, the first step using 64 markers (36 markers for Ovarian) with average sensitivities of 75%, and requiring a minimum of 5 markers positive, then, with an overall specificity of 99.1%, the first step would identify 486,000 individuals (out of 54,000,000 total women ages 50-79 in the U.S.). This would include, at 80.3% sensitivity, about 4,416 individuals with Stage I ovarian cancer (out of 5,500 individuals with Stage I ovarian cancer). However, those 486,000 presumptive positive individuals would be evaluated in a second step of 96 markers (36 markers for ovarian cancer) with average sensitivities of 66%, requiring a minimum of 5 markers positive. The two-step test would identify 80.3%×71.5%=57.4%=3,157 individuals (out of 4,500 individuals with Stage I ovarian cancer) with ovarian cancer. With a specificity of 99.1%, the second test would also generate 486,000×0.9%=4,374 false-positives. The positive predictive value of such a test would be 3,157/(4,374+3,157)=41.9%. In other words, 1 in 2.4 individuals who tested positive would actually have Stage I ovarian cancer. In reality, one would need to also include the success for identifying Stage 2 and higher ovarian cancers. In expanding this example, the calculations are done with the anticipation that Stage I ovarian cancer has an average of 150 methylated (or hydroxymethylated) molecules per positive marker in the blood, Stage II ovarian cancer has an average of 200 methylated molecules per positive marker, and the higher stages (III & IV) have at least an average of 300 methylated molecules per positive marker. Also, assume all four stages are at 5,500, then 5,500×4=22,000 total individuals with ovarian cancer identified per year in the U.S. The above calculation already provided the false-positive rate for the early cancer. For Stage II cancer, 94.5% would be identified in the first step, of which 94.5%×90.0%=85%=4,675 individuals with Stage II ovarian cancer would be verified in the second step. For Stage III and IV ovarian cancer, 99.7% would be identified in the first step, of which 99.7%×99.2%=98.9%=10,879 individuals with late ovarian cancer would be identified. This brings the total identified at 3,157+4,675+10,879=18,711 individuals out of 22,000 with ovarian cancer, for an overall sensitivity of 85.1%. Overall, the positive predictive value of such a test would be 18,711/(18,711+4,374)=81.1%. In other words, 4 in 5 women who tested positive would actually have ovarian cancer, and this test would identify 7,832/11,000 or 71.2% of those individuals with early cancer, compared with the current rate of 15%.

[0386] How would these results vary for using this strategy (FIG. 1F) for detection of early ovarian cancer using 75% average marker sensitivities, with the anticipation that Stage I ovarian cancer has an average of 200 methylated molecules per positive marker in the blood, Stage II ovarian cancer has an average of 240 methylated molecules per positive marker, and the higher stages (III & IV) have at least an average of 300 methylated molecules per positive marker?

[0387] Assuming individual marker false-positive rates of 3%, the first step using 64 markers (36 markers for ovarian) with average sensitivities of 75%, and requiring a minimum of 5 markers positive, then, with an overall specificity of 99.1%, the first step would identify 486,000 individuals (out of 54,000,000 total women ages 50-79 in the U.S.). This would include, at 94.5% sensitivity, about 5,197 individuals with Stage I ovarian cancer (out of 5,500 individuals with Stage I ovarian cancer). However, those 486,000 presumptive positive individuals would be evaluated in a second step of 96 markers (36 markers for ovarian cancer) with average sensitivities of 66%, requiring a minimum of 5 markers positive. The two-step test would identify 94.5%×90.0%=85%=4,675 individuals (out of 5,500 individuals with Stage I ovarian cancer) with ovarian cancer. With a specificity of 99.1%, the second test would also generate 486,000×0.9%=4,374 false-positives. The positive predictive value of such a test would be 4,675/(4,374+4,675)=51.6%. In other words, 1 in 2 individuals who tested positive would actually have Stage I ovarian cancer. In reality, one would need to also include the success for identifying Stage 2 and higher ovarian cancers. Also, assume all four stages are at 5,500, then 5,500×4=22,000 total individuals with ovarian cancer would be identified per year in the U.S. The above calculation already provided the false-positive rate for the early cancer. For Stage II cancer, 98.3% would be identified in the first step, of which 98.3%×96.2%=94.5%=5,201 individuals with Stage II ovarian cancer would be verified in the second step. For Stage III and IV ovarian cancer, 99.7% would be identified in the first step, of which 99.7%×99.2%=98.9%=10,879 individuals with late ovarian cancer would be identified. This brings the total identified at 4,675+5,201+10,879=20,755 individuals out of 22,000 with ovarian cancer, for an overall sensitivity of 94.3%. Overall, the positive predictive value of such a test would be 20,755/(20,755+4,374)=82.6%. In other words, 4 in 5 women who tested positive would actually have ovarian cancer, and this test would identify 9,876/11,000 or 89.8% of those individuals with early cancer, compared with the current rate of 15%.

[0388] The aforementioned 5 groups of 48 markers, with average sensitivity of 75%, were designed to also be used to monitor treatment (see FIG. 1M). Currently, with a newly diagnosed cancer, cancer tissue (or liquid biopsy) is subjected to targeted sequencing to identify mutations or gene rearrangements that may be used to guide therapy. For a given cancer (i.e. stomach cancer in Group 1), the cancer tissue or liquid biopsy may be tested with the 48-marker group (1) panel. If the cancer had been identified in the first place using the 2-step screens identified in FIG. 1F or 1J, then they will have already undergone the 48-marker group specific test in step 2 of that assay. Of the 48 markers tested, on average 12-24 would be positive. These may then be bundled together in a patient-specific test to monitor treatment efficacy. The plasma of such a patient would be tested post surgery, and during the treatment regimen. The plasma is monitored for loss of the 12-24 marker signal, but if 3 positive markers remain positive, then this may guide the physician to change therapy. Depending on the cancer type, and how many molecules enter the plasma, 3 markers would be predicted to identify treatment efficacy or failure with an accuracy of 82.6% to 99.4%.

[0389] The aforementioned 5 groups of 48 markers were designed to also be used to monitor for recurrence (see FIG. 1N). If the cancer had been identified in the first place using the 2-step screens identified in FIGS. 1F and 1J, and/or was monitored as described in FIG. 1M, then they will have already undergone the 48-marker group specific test, for which on average 12-24 would be positive. These may then be bundled together in a patient-specific test to monitor for recurrence. The plasma of such a patient who recovered from the original cancer would be monitored for gain of markers from the 12-24 marker panel. Results are scored as follows: 0-2 positive markers are considered cancer-free; 3 positive markers are directed to go to the second step. The plasma would be subjected to targeted sequencing to identify mutations or gene rearrangements that may be used to guide therapy of the recurrent tumor. Depending on the cancer type, and how many molecules enter the plasma, 3 markers would be predicted to identify early recurrence with an accuracy of 82.6% to 99.4%.

[0390] The biology of each cancer is different, and thus the observed sensitivity and specificity for detecting early cancer, monitoring treatment, and detecting early recurrence may be higher or lower from the idealized calculations described herein.

### PROPHETIC EXAMPLES

### Materials and Methods of Prophetic Examples

[0391] HT-29 colon adenocarcinoma cells are seeded in 60 cm² culture dishes in McCoy's 5A medium containing 4.5 g/l glucose, supplemented with 10% fetal calf serum, and cultured in a humidified atmosphere containing 5% CO₂. Once cells reach 80-90% confluence, they are washed in Phosphate Buffered Saline (×3), and collected by centrifugation (500×g). Genomic DNA is isolated using the DNeasy Blood & Tissue Kit (Qiagen; Valencia, Calif.), and its concentration is measured using Quant-iT Pico green Assay (Life Technologies/Thermo-Fisher; Waltham, Mass.).

[0392] High molecular weight (>50 kb) genomic DNA (0.2 mg/ml) is isolated from human blood (buffy coat) (Roche human genomic DNA) and is purchased from Roche (Indianapolis, Ind.). Its concentration is similarly determined using Quant-iT PicoGreen dsDNA Assay Kit.

[0393] Cell free DNA is isolated from 5 ml plasma sample (with K₂EDTA additive as anti-coagulant) using the QIA amp Circulating Nucleic Acid Kit according to manufacturer's instructions, and quantified using Quant-iT Pico Green Assay (Life Technologies/ThermoFisher; Waltham, Mass.).

[0394] Genomic DNA is fragmented through a non random sonication method, using Covaris ultra sonicator (Woburn, Mass.). The quality of the sheared DNA fragments (length range from 50 to 1 kb base pairs) is assessed with Agilent Bioanalyzer system. DNA fragments containing methylated CpGs are captured by methylation-specific antibodies, using the EpiMark® Methylated DNA Enrichment Kit according to manufacturer's instructions (New England Biolabs; Ipswich, Mass.).

[0395] PCR primers and LDR probes. All primers to be used in the various categories are listed in the Tables below. Primers are purchased from Integrated DNA Technologies Inc. (IDT) (Coralville, Iowa). Primers designed for use in Step 1 of the 96-marker assay, with average sensitivities of 50%, detect solid tumors are listed in Table 40 below. Primers designed for use in Step 2 of the Group 1-64-marker assay, with average sensitivities of 50%, to detect and identify colorectal, stomach, and esophageal cancers are listed in Table 47 below. Primers designed for use in Step 2 of the Group 2-48-64-marker assay, with average sensitivities of 50%, to detect and identify breast, endometrial, ovarian, cervical, and uterine cancers are listed in Table 48 below. Primers designed for use in Step 2 of the Group 3-48-64-marker assay, with average sensitivities of 50%, to detect and identify lung adenocarcinomas, lung squamous cell carcinoma, and head & neck cancers are listed in Table 49 below. Primers designed for use in Step 2 of the Group 4-36-48-marker assay, with average sensitivities of 50%, to detect and identify prostate and bladder cancers are listed in Table 50 below. Primers designed for use in Step 2 of the Group 5-48-64-marker assay, with average sensitivities of 50%, to detect and identify liver, pancreatic, and gall-bladder cancers are listed in Table 51 below.

Lengthy table referenced here
US20220205050A1-20220630-T00001
Please refer to the end of the specification for access instructions.

### Prophetic Example 1: Detection of Cancer-Gene Methylation in Cancer Cell Line DNA at the Single Molecule Level

[0396] 500 ng HT29 cell line genomic DNA is treated with ten-eleven translocation (TET1) dioxygenase and pyridine-borane for conversion of 5mC (5-methyl cytosine) and 5hmC (5-hydroxy-methyl cytosine) to DHU (dihydrouracil) generally as described by Liu et al., “Bisulfite-Free Direct Detection of 5-methylcytosine and 5-hydroxymethylcytosine at Base Resolution,” Nat Biotechnol. 37:424-429 (2019), which is hereby incorporated by reference in its entirety.

[0397] The desired cancer gene primers and probes (listed in Table 24) are available from Integrated DNA Technologies Inc. (IDT) (Coralville, Iowa).

[0398] A 130 μl-volume PCR reaction is set up as follows: 23.14 μl of nuclease free water (IDT), 26 μl of GoTaq Flexi buffer 5× without Magnesium (Pro-mega, Madison, Wis.), 10.4 μl of MgCl₂ at 25 mM (Promega, Madison, Wis.), 2.6 μl of dNTPs (10 mM each of dATP, dCTP, dGTP and dUTP) (Promega, Madison, Wis.), 3.25 μl of desired cancer gene forward primer at 2 μM, 3.25 μl of desired cancer gene reverse primer at 2 μM, 3.25 μl of RNAseH2 (IDT) at 20 mU/μl, 2.86 μl of Klentaq1 polymerase (DNA Polymerase Technology, St. Louis, Mo.) mixed with Plantinim Taq Antibody (Invitrogen, Carlsbad, Calif.) (the mixture is prepared by adding 0.3 μl of Klentaq1 polymerase at 50 U/μl to 3 μl of Platinum Taq Antibody at 5 U/μl), and 39 μl of corresponding template.

[0399] Each 130 μl PCR mixture is divided into 12 aliquots (tubes or wells), 10 μl each, and then the PCR reactions are run in a Proflex PCR system thermo-cycler (Applied Biosystems/ThermoFisher; Waltham, Mass.) with the following program: 2 min at 95° C., 35 cycles of (10 sec at 94° C., 30 sec at 60° C., and 30 sec at 72° C.), 10 min at 99.5° C., and a final hold at 4° C.

[0400] The LDR step is performed in a 10 μl reaction prepared by adding: 5.82 μl of nuclease free water (IDT), 1 μl of 10×AK16D ligase reaction buffer (1× buffer contains 20 mM Tris-HCl at pH 8.5 (Bio-Rad, Hercules, Calif.), 5 mM MgCl₂ (Sigma-Aldrich, St. Louis, Mo.), 50 mM KCl (Sigma-Aldrich), 10 mM DTT (Sigma-Aldrich) and 20 μg/ml of BSA (Sigma-Aldrich)), 0.25 μl of DTT (Sigma-Aldrich) at 40 mM, 0.25 μl of NAD (Sigma-Aldrich) at 40 mM, 0.25 μl of RNAseH2 (IDT) at 20 mU/μl, 0.2 μl of desired cancer gene upstream LDR probe at 500 nM, 0.2 μl of desired cancer gene downstream LDR probe at 500 nM, 0.028 μl of purified AK16D ligase at 8.8 μM, and 2 μl of PCR reaction. LDR reactions are run in a Proflex PCR system thermocycler (Applied Biosystems) with the following program: 20 cycles of (10 sec at 94° C., and 4 min at 60° C.) followed by a final infinite hold at 4° C.

[0401] The qPCR step is performed in a 10 μl of reaction mixture prepared by adding: 1.5 μl of nuclease free water (IDT), 5 μl of 2× TaqMan® Fast Universal PCR Master Mix (consists of Amplitaq, UDG and dUTP) from Applied Biosystems (Life Technologies, Grand Island, N.Y.), 1 μl of desired cancer gene Tag forward primer at 2.5 μM, 1 μl of desired cancer gene Tag reverse primer at 2.5 μM, 0.5 μl of desired cancer gene Taqman™ probe at 5 μM, and 1 μl of LDR reaction products. The qPCR reactions are run in a ViiA7 real-time thermo-cycler from Applied Biosystems (Life Technologies, Grand Island, N.Y.), using MicroAmp® Fast-96-Well Reaction 0.1 ml plates sealed with MicroAmp™ Optical adhesive film (Applied Biosystems), with the following settings: fast block, Standard curve as experiment type, ROX as passive reference, Ct as quantification method (automatic threshold, but adjusted to 0.05 when needed), TAMRA as reporter, and NFQ-MGB as quencher. The program is set at: 2 min at 50° C., and 40 cycles of (1 sec at 95° C., and 20 sec at 60° C.).

### Prophetic Example 2: Multiplexed Detection of 12 CRC Methylation Markers Using exPCR-LDR-qPCR on Cancer Cell Line DNA

[0402] 500 ng HT29 cell line genomic DNA is treated with ten-eleven translocation (TET1) dioxygenase and pyridine-borane for conversion of 5mC (5-methyl cytosine) and 5hmC (5-hydroxy-methyl cytosine) to DHU (dihydrouracil) generally as described by Liu et al., “Bisulfite-Free Direct Detection of 5-methylcytosine and 5-hydroxymethylcytosine at Base Resolution,” Nat Biotechnol. 37:424-429 (2019), which is hereby incorporated by reference in its entirety.

[0403] The desired cancer gene primers and probes (listed in Table 24) are available from Integrated DNA Technologies Inc. (IDT) (Coralville, Iowa).

[0404] Linear amplification step. The linear amplification step is performed in a 25 μl of reaction mixture with: 5 μl of Gotaq Flexi buffer 5× without Magnesium (Promega, Madison, Wis.), 2.5 μl of MgCl₂ at 25 mM (Promega, Madison, Wis.), 0.5 μl of dNTPs (with dATP, dCTP, dGTP and dTTP, 10 mM each) (Promega, Madison, Wis.), 1.25 μl of 12-plex gene specific one-direction primers (i.e., forward primers; concentration of primer for each gene is 2 μM), 0.625 μl of RNAseH2 (IDT) at 20 mU/μl (diluted in RNAseH2 dilution buffer from IDT), and 0.55 μl of Klentaq1 polymerase (DNA Polymerase Technology, St. Louis, Mo.) mixed with Platinum Taq Antibody (Invitrogen/Thermo Fisher, Waltham, Mass.) (the mixture is prepared by adding 0.02 μl of Klentaq1 polymerase at 50 U/μl to 0.2 μl of Platinum Taq Antibody at 5 U/μl), and 14.5 μl of corresponding Tet1, pyridine-borane converted genomic DNA (out of 50 μl of eluted DNA after conversion). Linear amplification reactions are run in a ProFlex PCR system thermocycler (Applied Biosystems/ThermoFisher, Waltham, Mass.) and run with the following program: 2 min at 94° C., 40 cycles of (20 sec at 94° C., 40 sec at 60° C. and 30 sec at 72° C.), a final hold at 4° C. After the reaction, Platinum Taq antibodies are added in the reaction mixture to inhibit the Klentaq DNA polymerase.

[0405] PCR reaction. The linear amplification products are equally divided into two parts (2 times 6-plex for 2 times 6 CpG markers). The PCR step is performed in a 20 μl reaction volume; prepared by mixing: 2 μl of 5× Gotaq Flexi buffer without Magnesium (Promega, Madison, Wis.), 1 μl of MgCl₂ at 25 mM (Promega, Madison, Wis.), 0.4 μl of dNTPs (with 10 mM each for dATP, dCTP, dGTP and dUTP) (Promega, Madison, Wis.), 1 μl of each of the opposite-strand PCR primer (2 μM concentration), 0.4 μl of Antarctic Thermolabile UDG (1 u/μl) (New England Biolab, Ipswich, Mass.), 0.25 μl of RNAseH2 (IDT) at 20 mU/μl, 0.44 μl of Klentaq1 polymerase (DNA Polymerase Technology, St. Louis, Mo.) mixed with Platinum Taq Antibody (Invitrogen/Thermo Fisher, Waltham, Mass.) (the mixture is prepared by adding 0.02 μl of Klentaq1 polymerase at 50 U/μl to 0.2 μl of Platinum Taq Antibody at 5 U/μl), and 12 μl of corresponding linear amplification products. PCR reactions are run in a ProFlex PCR system thermocycler (Applied Biosystems/ThermoFisher, Waltham, Mass.) with the following program: 10 min at 37° C., 40 cycles of (20 sec at 94° C., 40 sec at 60° C. and 30 sec at 72° C.), 10 min at 99.5° C., and a final hold at 4° C.

[0406] LDR step. The LDR step is performed in a 20 μl of reaction volume by mixing: 11.6 μl of nuclease free water (IDT), 2 μl of 10× AK16D ligase reaction buffer [1× buffer contains 20 mM Tris-HCl pH 8.5 (Bio-Rad, Hercules, Calif.), 5 mM MgCl₂ (Sigma-Aldrich, St. Louis, Mo.), 50 mM KCl (Sigma-Aldrich, St. Louis, Mo.), 10 mM DTT (Sigma-Aldrich, St. Louis, Mo.) and 20 μg/ml of BSA (Sigma-Aldrich, St. Louis, Mo.), 0.5 μl of DTT (Sigma-Aldrich, St. Louis, Mo.) at 40 mM, 0.4 μl of NAD+ (Sigma-Aldrich, St. Louis, Mo.) at 50 mM, 0.5 μl of RNAseH2 (IDT) at 20 mu/μl, 0.4 μl of corresponding 6 plex LDR upstream probes at 500 nM, 0.4 μl of corresponding 6 plex LDR downstream probes at 500 nM, (3 plex for the other LDR reaction), 0.57 μl of purified AK16D ligase at 0.88 μM, and 4 μl of corresponding PCR reaction products from previous step. LDR reactions are run in a ProFlex PCR system thermocycler (Applied Biosystems/ThermoFisher; Waltham, Mass.) using the following program: 20 cycles of (10 sec at 94° C., and 4 min at 60° C.) followed by a final hold at 4° C.

[0407] qPCR step. Uni-plex qPCR reactions (i.e. each reaction tube contains only the primers and probe specific to a unique CpG site) are performed in a 10 μl reaction mixture containing: 3 μl of nuclease free water (IDT), 5 μl of 2× TaqMan® Fast Universal PCR Master Mix (Fast Amplitaq, UDG and dUTP) from Applied Biosystems (Applied Biosystems/ThermoFisher; Waltham, Mass.), 0.5 μl of mixture of TaqMan™ Assay forward and reverse primers at 5 μM each, 0.5 μl of Taqman™ probe at 5 μM, and 1 μl of corresponding LDR reaction products. The reactions are run in a ViiA7 real-time thermo-cycler from Applied Biosystems (Applied Biosystems/ThermoFisher; Waltham, Mass.), using MicroAmp® Fast-96-Well Reaction 0.1 ml plates sealed with MicroAmp™ Optical adhesive film (Applied Biosystems/ThermoFisher; Waltham, Mass.), with the following setting: fast block, Standard curve as experiment type, ROX as passive reference, Ct as quantification method (automatic threshold, but adjusted to 0.05 when needed), TAMRA as reporter, and NFQ-MGB as quencher. The thermocycler is programmed as follows: 2 min at 50° C., and 45 cycles of (1 sec at 95° C., and 20 sec at 60° C.).

### Prophetic Example 3: Multiplexed Detection of 20 CRC Markers by exPCR-LDR-qPCR on Cancer Cell Line DNA

[0408] 500 ng HT29 cell line genomic DNA is treated with ten-eleven translocation (TET1) dioxygenase and pyridine-borane for conversion of 5mC (5-methyl cytosine) and 5hmC (5-hydroxy-methyl cytosine) to DHU (dihydrouracil) generally as described by Liu et al., “Bisulfite-Free Direct Detection of 5-methylcytosine and 5-hydroxymethylcytosine at Base Resolution,” Nat Biotechnol. 37:424-429 (2019), which is hereby incorporated by reference in its entirety.

[0409] The desired cancer gene primers and probes (listed in Table 24) are available from Integrated DNA Technologies Inc. (IDT) (Coralville, Iowa).

[0410] Linear amplification step. In a 25 μl of reaction volume, the linear amplification step is performed by mixing: 5 μl of 5× Gotaq Flexi buffer (no Magnesium) (Promega, Madison, Wis.), 2.5 μl of 25 mM MgCl₂ (Promega, Madison, Wis.), 0.5 μl of 10 mM dNTPs (dATP, dCTP, dGTP and dTTP) (Promega, Madison, Wis.), 2.5 μl of 20 plex gene specific one direction primers (concentration of each primer is 1 μM), 0.625 μl of 20 mU/μl RNAseH2 (diluted in RNAseH2 dilution buffer from IDT) (IDT), and 0.55 μl of Klentaq1 polymerase (DNA Polymerase Technology, St. Louis, Mo.) mixed with Platinum Taq Antibody (Invitrogen/Thermo Fisher, Waltham, Mass.) (the mixture is prepared by adding 0.02 μl of Klentaq1 polymerase at 50 U/μl to 0.2 μl of Platinum Taq Antibody at 5 U/μl), and 5.0 μl of corresponding TET1, pyridine-boronate converted genomic DNA. The reactions are run in a ProFlex PCR system thermocycler (Applied Biosystems/ThermoFisher, Waltham, Mass.) using the following program: 2 min at 94° C., 40 cycles of (20 sec at 94° C., 40 sec at 60° C., and 30 sec at 72° C.), and a final hold at 4° C. Platinum Taq Antibodies are added in the reaction mixture to inhibit the Klentaq DNA polymerase before the next step.

[0411] PCR reaction. The linear amplification products are equally divided into two parts. In the 1^{st} part, first 10 plex (out of 20 plex) gene specific other direction primers and other reagents are added, in the 2^{nd} part, the other 10 plex (out of 20 plex) gene specific other direction primers and other reagents are added. Two 10 plex PCR reactions are carried out. The PCR step is performed in a 20 μl of reaction mixture prepared by adding: 2 μl of Gotaq Flexi buffer 5× without Magnesium (Promega, Madison, Wis.), 1 μl of MgCl₂ at 25 mM (Promega, Madison, Wis.), 0.4 μl of dNTPs (with dATP, dCTP, dGTP and dUTP, 10 mM each) (Promega, Madison, Wis.), 2 μl of 10 plex (out of 20 plex in linear amplification step) gene specific forward primers at 0.5 μM each. 0.4 μl of Antarctic Thermolabile UDG (1 u/μl) (New England Biolab, Ipswich, Mass.), 0.25 μl of RNAseH2 (IDT) at 20 mU/μl, 0.44 μl of Klentaq1 polymerase (DNA Polymerase Technology, St. Louis, Mo.) mixed with Platinum Taq Antibody (Invitrogen/Thermo Fisher, Waltham, Mass.) (The mixture is prepared by adding 0.02 μl of Klentaq1 polymerase at 50 U/μl to 0.2 μl of Platinum Taq Antibody at 5 U/μl), and 10 μl of corresponding linear amplification products. PCR reactions are run in a ProFlex PCR system thermocycler (Applied Biosystems/ThermoFisher, Waltham, Mass.) and using the following program: 10 min at 37° C., 40 cycles of (20 sec at 94° C., 40 sec at 60° C. and 30 sec at 72° C.), 10 min at 99.5° C., and a final hold at 4° C.

[0412] LDR step. The LDR step is performed in a 20 μl reaction prepared by combining: 5.82 μl of nuclease free water (IDT), 2 μl of 10× AK16D ligase reaction buffer (lx buffer contains 20 mM Tris-HCl pH 8.5 (Bio-Rad, Hercules, Calif.), 5 mM MgCl₂ (Sigma-Aldrich, St. Louis, Mo.), 50 mM KCl (Sigma-Aldrich, St. Louis, Mo.), 10 mM DTT (Sigma-Aldrich, St. Louis, Mo.) and 20 μg/ml of BSA (Sigma-Aldrich, St. Louis, Mo.)), 0.5 μl of 40 mM DTT (Sigma-Aldrich, St. Louis, Mo.), 0.25 μl of 40 mM NAD+ (Sigma-Aldrich, St. Louis, Mo.), 0.5 μl of 20 mU/μl RNAseH2 (IDT), 0.4 μl of corresponding 10 plex LDR upstream probes at 500 nM each, 0.4 μl of corresponding 10 plex LDR downstream probes at 500 nM each, 0.57 μl of purified AK16D ligase (at 0.88 μM), and 4 μl of PCR reaction products from previous step. LDR reactions are run in a ProFlex PCR system thermocycler (Applied Biosystems/Thermo-Fisher; Waltham, Mass.) using the following program: 20 cycles of (10 sec at 94° C., and 4 min at 60° C.) followed by a final hold at 4° C.

[0413] qPCR step. The qPCR step is performed in a 10 μl of reaction volume by combining: 1.5 μl of nuclease free water (IDT), 5 μl of 2× TaqMan® Fast Universal PCR Master Mix (Fast amplitaq, UDG and dUTP) from Applied Biosystems (Applied Biosystems/ThermoFisher; Waltham, Mass.), 1 μl of 2.5 μM TaqMan™ Assay forward primer, 1 μl of 2.504 Taqman™ reverse primer, 0.5 μl of 5 μM Taqman™ probe, and 1 μl of LDR reaction products. qPCR reactions are run in a ViiA7 real-time thermo-cycler from Applied Biosystems (Applied Biosystems/Thermo-Fisher; Waltham, Mass.), using MicroAmp® Fast-96-Well Reaction 0.1 ml plates sealed with MicroAmp™ Optical adhesive film (Applied Biosystems/ThermoFisher; Waltham, Mass.), with the following setting: fast block, Standard curve as experiment type, ROX as passive reference, Ct as quantification method (automatic threshold, but adjusted to 0.05 when needed), TAMRA as reporter, and NFQ-MGB as quencher. The program employed was: 2 min at 50° C., and 45 cycles of (1 sec at 95° C., and 20 sec at 60° C.).

### Prophetic Example 4: Multiplexed Detection of 20 CRC Methylation Markers by exPCR-LDR-qPCR on Cell Free DNA in Tumor Plasma

[0414] Human plasma (with K2-EDTA as an anti-coagulant) samples are purchased from a vendor. Cell free DNA is isolated from individual plasma samples (5 mL) using the QIA amp Circulating Nucleic Acid Kit (Qiagen) according to manufacturer's instructions, and quantified with Quant-iT Pico Green Assay Life Technologies/Thermo-Fisher; Waltham, Mass.). The linear amplification, PCR, LDR and qPCR steps are carried out as described in Example 3.

[0415] Although preferred embodiments have been depicted and described in detail herein, it will be apparent to those skilled in the relevant art that various modifications, additions, substitutions, and the like can be made without departing from the spirit of the present application and these are therefore considered to be within the scope of the present application as defined in the claims which follow.

LENGTHY TABLES
The patent application contains a lengthy table section. A copy of the table is available in electronic form from the USPTO web site (https://seqdata.uspto.gov/?pageRequest=docDetail&DocID=US20220205050A1). An electronic copy of the table will also be available from the USPTO upon request and payment of the fee set forth in 37 CFR 1.19(b)(3).

What is claimed:

1. A method for identifying, in a sample, one or more parent nucleic acid molecules containing a target nucleotide sequence differing from nucleotide sequences of other parent nucleic acid molecules in the sample by one or more nucleotides, one or more copy numbers, one or more transcript sequences, and/or one or more methylated or hydroxymethylated residues, said method comprising:
providing a sample containing one or more parent nucleic acid molecules potentially containing the target nucleotide sequence differing from the nucleotide sequences of other parent nucleic acid molecules by one or more nucleotides, one or more copy numbers, one or more transcript sequences, and/or one or more methylated or hydroxymethylated residues;
providing one or more enzymes capable of digesting deoxyuracil (dU)-containing nucleic acid molecules;
providing one or more primary oligonucleotide primer sets, each primary oligonucleotide primer set comprising (a) a first primary oligonucleotide primer that comprises a nucleotide sequence that is complementary to a sequence in the parent nucleic acid molecule adjacent to the target nucleotide sequence and (b) a second primary oligonucleotide primer that comprises a nucleotide sequence that is complementary to a portion of an extension product formed from the first primary oligonucleotide primer, wherein the first or second primary oligonucleotide primer further comprises of a 5′ primer-specific portion;
blending the sample, the one or more first primary oligonucleotide primers of the primer sets, the one or more enzymes capable of digesting deoxyuracil (dU)-containing nucleic acid molecules, a deoxynucleotide mix, and a DNA polymerase to form one or more polymerase extension reaction mixtures;
subjecting the one or more polymerase extension reaction mixtures to conditions suitable for digesting deoxyuracil (dU)-containing nucleic acid molecules present in the polymerase extension reaction mixtures and for carrying out one or more polymerase extension reaction cycles comprising a denaturation treatment, a hybridization treatment, and an extension treatment, thereby forming primary extension products comprising nucleotide sequences complementary to the target nucleotide sequence;
blending the one or more polymerase extension reaction mixtures comprising the primary extension products, the one or more second primary oligonucleotide primers of the primary oligonucleotide primer sets, the one or more enzymes capable of digesting deoxyuracil (dU)-containing nucleic acid molecules in the reaction mixtures, a deoxynucleotide mix including dUTP, and a DNA polymerase to form one or more first polymerase chain reaction mixtures;
subjecting the one or more first polymerase chain reaction mixtures to conditions suitable for digesting deoxyuracil (dU)-containing nucleic acid molecules present in the polymerase chain reaction mixtures and for carrying out one or more first polymerase chain reaction cycles comprising a denaturation treatment, a hybridization treatment, and an extension treatment, thereby forming first polymerase chain reaction products comprising the target nucleotide sequence or a complement thereof;
providing one or more oligonucleotide probe sets, each probe set comprising (a) a first oligonucleotide probe having a 5′ primer-specific portion and a 3′ target sequence-specific portion, and (b) a second oligonucleotide probe having a 5′ target sequence-specific portion and a 3′ primer-specific portion, wherein the first and second oligonucleotide probes of a probe set are configured to hybridize, in a base specific manner, on a complementary target nucleotide sequence of a first polymerase chain reaction product;
blending the first polymerase chain reaction products with a ligase, and the one or more oligonucleotide probe sets to form one or more ligation reaction mixtures;
subjecting the one or more ligation reaction mixtures to one or more ligation reaction cycles whereby the first and second oligonucleotide probes of the one or more oligonucleotide probe sets are ligated together, when hybridized to their complementary sequence, to form ligated product sequences in the ligation reaction mixtures wherein each ligated product sequence comprises the 5′ primer-specific portion, the target-specific portions, and the 3′ primer-specific portion;
providing one or more secondary oligonucleotide primer sets, each secondary oligonucleotide primer set comprising (a) a first secondary oligonucleotide primer comprising the same nucleotide sequence as the 5′ primer-specific portion of the ligated product sequence and (b) a second secondary oligonucleotide primer comprising a nucleotide sequence that is complementary to the 3′ primer-specific portion of the ligated product sequence;
blending the ligated product sequences, the one or more secondary oligonucleotide primer sets, the one or more enzymes capable of digesting deoxyuracil (dU)-containing nucleic acid molecules, a deoxynucleotide mix including dUTP, and a DNA polymerase to form one or more second polymerase chain reaction mixtures;
subjecting the one or more second polymerase chain reaction mixtures to conditions suitable for digesting deoxyuracil (dU)-containing nucleic acid molecules present in the second polymerase chain reaction mixtures and for carrying out one or more polymerase chain reaction cycles comprising a denaturation treatment, a hybridization treatment, and an extension treatment thereby forming second polymerase chain reaction products; and
detecting and distinguishing the second polymerase chain reaction products in the one or more second polymerase chain reaction mixtures to identify the presence of one or more parent nucleic acid molecules containing target nucleotide sequences differing from nucleotide sequences in other parent nucleic acid molecules in the sample by one or more nucleotides, one or more copy numbers, one or more transcript sequences, and/or one or more methylated or hydroxymethylated residues.

2. A method for identifying, in a sample, one or more parent nucleic acid molecules containing a target nucleotide sequence differing from nucleotide sequences of other parent nucleic acid molecules in the sample by one or more nucleotides, one or more copy numbers, one or more transcript sequences, and/or one or more methylated or hydroxymethylated residues, said method comprising:
providing a sample containing one or more parent nucleic acid molecules potentially containing the target nucleotide sequence differing from the nucleotide sequences of other parent nucleic acid molecules by one or more nucleotides, one or more copy numbers, one or more transcript sequences, and/or one or more methylated or hydroxymethylated residues;
providing one or more enzymes capable of digesting deoxyuracil (dU)-containing nucleic acid molecules;
providing one or more nucleases capable of digesting nucleic acid molecules present not comprising polymerase-incorporated modified nucleotides;
providing one or more primary oligonucleotide primer sets, each primary oligonucleotide primer set comprising (a) a first primary oligonucleotide primer that comprises a nucleotide sequence that is complementary to a sequence in the parent nucleic acid molecule adjacent to the target nucleotide sequence and (b) a second primary oligonucleotide primer that comprises a nucleotide sequence that is complementary to a portion of an extension product formed from the first primary oligonucleotide primer, wherein the first or second primary oligonucleotide primer further comprises a 5′ primer-specific portion;
blending the sample, the one or more first primary oligonucleotide primers, the one or more enzymes capable of digesting deoxyuracil (dU)-containing nucleic acid molecules, a deoxynucleotide mix that comprises one or more modified nucleotides that protect extension products but not other DNA from nuclease digestion, and a DNA polymerase to form one or more polymerase extension reaction mixtures;
subjecting the one or more polymerase extension reaction mixtures to conditions suitable for digesting deoxyuracil (dU)-containing nucleic acid molecules present in the polymerase extension reaction mixtures and for carrying out one or more polymerase extension reaction cycles comprising a denaturation treatment, a hybridization treatment, and an extension treatment, thereby forming primary extension products comprising modified nucleotide bases and comprising the complement of the target nucleotide sequence;
blending the one or more polymerase extension reaction mixtures comprising the primary extension products with the one or more nucleases;
subjecting the one or more polymerase extension reaction mixtures comprising the primary extension products with the one or more nucleases to conditions suitable for digesting nucleic acid molecules but not primary extension products comprising modified nucleotides to produce one or more partially digested polymerase extension reaction mixtures;
blending the one or more partially digested polymerase extension reaction mixtures, the one or more secondary primary oligonucleotide primers of the primer sets, a deoxynucleotide mix, and a DNA polymerase to form one or more first polymerase chain reaction mixtures;
subjecting the one or more first polymerase chain reaction mixtures to conditions suitable for carrying out two or more first polymerase chain reaction cycles comprising a denaturation treatment, a hybridization treatment, and an extension treatment, thereby forming first polymerase chain reaction products comprising the target nucleotide sequence or a complement thereof;
providing one or more secondary oligonucleotide primer sets, each secondary oligonucleotide primer set comprising (a) a first secondary oligonucleotide primer having a 3′ portion that is complementary to a portion of an extension product formed from the first primary oligonucleotide primer and (b) a second secondary oligonucleotide primer having a 3′ portion that comprises a nucleotide sequence that is complementary to a portion of an extension product formed from the first secondary oligonucleotide primer;
blending the first polymerase chain reaction products, the one or more secondary oligonucleotide primer sets, the one or more enzymes capable of digesting deoxyuracil (dU) containing nucleic acid molecules, a deoxynucleotide mix including dUTP, and a DNA polymerase to form one or more second polymerase chain reaction mixtures;
subjecting the one or more second polymerase chain reaction mixtures to conditions suitable for digesting deoxyuracil (dU)-containing nucleic acid molecules present in the second polymerase chain reaction mixtures and for carrying out two or more second polymerase chain reaction cycles comprising a denaturation treatment, a hybridization treatment, and an extension treatment thereby forming second polymerase chain reaction products; and
detecting and distinguishing the second polymerase chain reaction products in the one or more second polymerase chain reaction mixtures to identify the presence of one or more parent nucleic acid molecules containing target nucleotide sequences differing from nucleotide sequences in other parent nucleic acid molecules in the sample by one or more nucleotides, one or more copy numbers, one or more transcript sequences, and/or one or more methylated or hydroxymethylated residues.

3. A method for identifying, in a sample, one or more parent nucleic acid molecules containing a target nucleotide sequence differing from nucleotide sequences in other parent nucleic acid molecules in the sample by one or more methylated or hydroxymethylated residues, said method comprising:
providing a sample containing one or more parent nucleic acid molecules potentially containing the target nucleotide sequence differing from the nucleotide sequences in other parent nucleic acid molecules by one or more methylated or hydroxymethylated residues;
subjecting the nucleic acid molecules in the sample to a treatment with one or more DNA repair enzymes and chemicals under conditions suitable to convert methylated and hydroxymethylated cytosine residues to dihydrouracil residues to produce a treated sample;
providing one or more enzymes capable of digesting deoxyuracil (dU)-containing nucleic acid molecules;
providing one or more primary oligonucleotide primer sets, each primary oligonucleotide primer set comprising (a) a first primary oligonucleotide primer that comprises a nucleotide sequence that is complementary to a sequence in the parent nucleic acid molecule adjacent to the DNA repair enzyme and chemically-treated target nucleotide sequence containing the one or more converted methylated or hydroxymethylated residue and (b) a second primary oligonucleotide primer that comprises a nucleotide sequence that is complementary to a portion of an extension product formed from the first primary oligonucleotide primer, wherein the first or second primary oligonucleotide primer further comprises a 5′ primer-specific portion;
blending the treated sample, the one or more first primary oligonucleotide primers of the primer sets, the one or more enzymes capable of digesting deoxyuracil (dU)-containing nucleic acid molecules, a deoxynucleotide mix including dUTP, and a DNA polymerase to form one or more polymerase extension reaction mixtures;
subjecting the one or more polymerase extension reaction mixtures to conditions suitable for digesting deoxyuracil (dU)-containing nucleic acid molecules present in the polymerase extension reaction mixtures and for carrying out one or more polymerase extension reaction cycles comprising a denaturation treatment, a hybridization treatment, and an extension treatment, thereby forming primary extension products comprising the complement of the DNA repair enzyme and chemically-treated target nucleotide sequence;
blending the one or more polymerase extension reaction mixtures comprising the primary extension products, the one or more second primary oligonucleotide primers of the primer sets, a deoxynucleotide mix including dUTP, and a DNA polymerase to form one or more first polymerase chain reaction mixtures;
subjecting the one or more first polymerase chain reaction mixtures to conditions suitable for carrying out one or more first polymerase chain reaction cycles comprising a denaturation treatment, a hybridization treatment, and an extension treatment, thereby forming first polymerase chain reaction products comprising the DNA repair enzyme and chemically-treated target nucleotide sequence or a complement thereof;
providing one or more oligonucleotide probe sets, each probe set comprising (a) a first oligonucleotide probe having a 5′ primer-specific portion and a 3′ DNA repair enzyme and chemically-treated target nucleotide sequence-specific or complement sequence-specific portion, and (b) a second oligonucleotide probe having a 5′ DNA repair enzyme and chemically-treated target nucleotide sequence-specific or complement sequence-specific portion and a 3′ primer-specific portion, and wherein the first and second oligonucleotide probes of a probe set are configured to hybridize, in a base specific manner, on a complementary nucleotide sequence of a first polymerase chain reaction product;
blending the first polymerase chain reaction products with a ligase and the one or more oligonucleotide probe sets to form one or more ligation reaction mixtures;
subjecting the one or more ligation reaction mixtures to one or more ligation reaction cycles whereby the first and second oligonucleotide probes of the one or more oligonucleotide probe sets are ligated together, when hybridized to their complementary sequence, to form ligated product sequences in the ligation reaction mixture wherein each ligated product sequence comprises the 5′ primer-specific portion, DNA repair enzyme and chemically-treated target nucleotide sequence-specific or complement sequence-specific portion, and the 3′ primer-specific portion;
providing one or more secondary oligonucleotide primer sets, each secondary oligonucleotide primer set comprising (a) a first secondary oligonucleotide primer comprising the same nucleotide sequence as the 5′ primer-specific portion of the ligated product sequence and (b) a second secondary oligonucleotide primer comprising a nucleotide sequence that is complementary to the 3′ primer-specific portion of the ligated product sequence;
blending the ligated product sequences, the one or more secondary oligonucleotide primer sets, the one or more enzymes capable of digesting deoxyuracil (dU)-containing nucleic acid molecules, a deoxynucleotide mix including dUTP, and a DNA polymerase to form one or more second polymerase chain reaction mixtures;
subjecting the one or more second polymerase chain reaction mixtures to conditions suitable for digesting deoxyuracil (dU)-containing nucleic acid molecules present in the second polymerase chain reaction mixtures and for carrying out one or more polymerase chain reaction cycles comprising a denaturation treatment, a hybridization treatment, and an extension treatment thereby forming second polymerase chain reaction products; and
detecting and distinguishing the second polymerase chain reaction products in the one or more second polymerase chain reaction mixtures to identify the presence of one or more parent nucleic acid molecules containing target nucleotide sequences differing from nucleotide sequences in other parent nucleic acid molecules in the sample by one or more methylated or hydroxymethylated residues.

4. A method for identifying, in a sample, one or more parent nucleic acid molecules containing a target nucleotide sequence differing from nucleotide sequences in other parent nucleic acid molecules in the sample by one or more methylated or hydroxymethylated residues, said method comprising:
providing a sample containing one or more parent nucleic acid molecules potentially containing the target nucleotide sequence differing from the nucleotide sequences in other parent nucleic acid molecules by one or more methylated or hydroxymethylated residues;
subjecting the nucleic acid molecules in the sample to a treatment with one or more DNA repair enzymes and chemicals under conditions suitable to convert methylated and hydroxymethylated cytosine residues to dihydrouracil residues to produce a treated sample;
providing one or more enzymes capable of digesting deoxyuracil (dU)-containing nucleic acid molecules;
providing one or more first primary oligonucleotide primer(s) that comprises a nucleotide sequence that is complementary to a sequence in the parent nucleic acid molecule adjacent to the DNA repair enzyme and chemically-treated target nucleotide sequence containing the one or more methylated or hydroxymethylated residue;
blending the treated sample, the one or more first primary oligonucleotide primers, the one or more enzymes capable of digesting deoxyuracil (dU)-containing nucleic acid molecules, a deoxynucleotide mix, and a DNA polymerase to form one or more polymerase extension reaction mixtures;
subjecting the one or more polymerase extension reaction mixtures to conditions suitable for digesting deoxyuracil (dU)-containing nucleic acid molecules present in the polymerase extension reaction mixtures and for carrying out one or more polymerase extension reaction cycles comprising a denaturation treatment, a hybridization treatment, and an extension treatment, thereby forming primary extension products comprising the complement of the DNA repair enzyme and chemically-treated target nucleotide sequence;
providing one or more secondary oligonucleotide primer sets, each secondary oligonucleotide primer set comprising (a) a first secondary oligonucleotide primer having a 5′ primer-specific portion and a 3′ portion that is complementary to a portion of the polymerase extension product formed from the first primary oligonucleotide primer and (b) a second secondary oligonucleotide primer having a 5′ primer-specific portion and a 3′ portion that comprises a nucleotide sequence that is complementary to a portion of an extension product formed from the first secondary oligonucleotide primer;
blending the one or more polymerase extension reaction mixtures comprising the primary extension products, the one or more secondary oligonucleotide primer sets, the one or more enzymes capable of digesting deoxyuracil (dU)-containing nucleic acid molecules, a deoxynucleotide mix, and a DNA polymerase to form one or more first polymerase chain reaction mixtures;
subjecting the one or more first polymerase chain reaction mixtures to conditions suitable for digesting deoxyuracil (dU)-containing nucleic acid molecules present in the first polymerase chain reaction mixtures, and conditions suitable for carrying out two or more polymerase chain reaction cycles comprising a denaturation treatment, a hybridization treatment, and an extension treatment, thereby forming first polymerase chain reaction products comprising a 5′ primer-specific portion of the first secondary oligonucleotide primer, a DNA repair enzyme and chemically-treated target nucleotide sequence-specific or complement sequence-specific portion, and a complement of the 5′ primer-specific portion of the second secondary oligonucleotide primer;
providing one or more tertiary oligonucleotide primer sets, each tertiary oligonucleotide primer set comprising (a) a first tertiary oligonucleotide primer comprising the same nucleotide sequence as the 5′ primer-specific portion of the first polymerase chain reaction products and (b) a second tertiary oligonucleotide primer comprising a nucleotide sequence that is complementary to the 3′ primer-specific portion of the first polymerase chain reactions product sequence;
blending the first polymerase chain reaction products, the one or more tertiary oligonucleotide primer sets, the one or more enzymes capable of digesting deoxyuracil (dU) containing nucleic acid molecules, a deoxynucleotide mix including dUTP, and a DNA polymerase to form one or more second polymerase chain reaction mixtures;
subjecting the one or more second polymerase chain reaction mixtures to conditions suitable for digesting deoxyuracil (dU)-containing nucleic acid molecules present in the second polymerase chain reaction mixtures and for carrying out one or more polymerase chain reaction cycles comprising a denaturation treatment, a hybridization treatment, and an extension treatment thereby forming second polymerase chain reaction products; and
detecting and distinguishing the second polymerase chain reaction products in the one or more second polymerase chain reaction mixtures to identify the presence of one or more parent nucleic acid molecules containing target nucleotide sequences differing from nucleotide sequences in other parent nucleic acid molecules in the sample by one or more methylated or hydroxymethylated residues.

5. A method for identifying, in a sample, one or more parent nucleic acid molecules containing a target nucleotide sequence differing from nucleotide sequences in other parent nucleic acid molecules in the sample by one or more methylated or hydroxymethylated residues, said method comprising:
providing a sample containing one or more nucleic acid molecules potentially containing the target nucleotide sequence differing from the nucleotide sequences in other nucleic acid molecules by one or more methylated or hydroxymethylated residues;
subjecting the nucleic acid molecules in the sample to a treatment with one or more DNA repair enzymes and chemicals under conditions suitable to convert methylated and hydroxymethylated cytosine residues to dihydrouracil residues to produce a treated sample;
providing one or more enzymes capable of digesting deoxyuracil (dU)-containing nucleic acid molecules present in the sample;
providing one or more primary oligonucleotide primer sets, each primary oligonucleotide primer set comprising (a) a first primary oligonucleotide primer that comprises a nucleotide sequence that is complementary to a sequence in the parent nucleic acid molecule adjacent to the DNA repair enzyme and chemically-treated target nucleotide sequence containing the one or more converted methylated or hydroxymethylated residue and (b) a second primary oligonucleotide primer that comprises a nucleotide sequence that is complementary to a portion of an extension product formed from the first primary oligonucleotide primer, wherein the first or second primary oligonucleotide primer further comprises a 5′ primer-specific portion;
blending the treated sample, the one or more first primary oligonucleotide primers of the primer sets, the one or more enzymes capable of digesting deoxyuracil (dU)-containing nucleic acid molecules in the extension reaction mixture, a deoxynucleotide mix, and a DNA polymerase to form one or more polymerase extension reaction mixtures;
subjecting the one or more polymerase extension reaction mixtures to conditions suitable for digesting deoxyuracil (dU)-containing nucleic acid molecules present in the polymerase extension reaction mixtures and for carrying out one or more polymerase extension reaction cycles comprising a denaturation treatment, a hybridization treatment, and an extension treatment, thereby forming primary extension products comprising the complement of the DNA repair enzyme and chemically-treated target nucleotide sequence;
blending the one or more polymerase extension reaction mixtures comprising the primary extension products, the one or more second primary oligonucleotide primers of the one or more primary oligonucleotide primer sets, the one or more enzymes capable of digesting deoxyuracil (dU)-containing nucleic acid molecules in the reaction mixture, a deoxynucleotide mix, and a DNA polymerase to form one or more first polymerase chain reaction mixtures;
subjecting the one or more first polymerase chain reaction mixtures to conditions suitable for carrying out one or more first polymerase chain reaction cycles comprising a denaturation treatment, a hybridization treatment, and an extension treatment, thereby forming first polymerase chain reaction products comprising the DNA repair enzyme and chemically-treated target nucleotide sequence or a complement thereof;
providing one or more secondary oligonucleotide primer sets, each secondary oligonucleotide primer set comprising (a) a first secondary oligonucleotide primer having a 3′ portion that is complementary to a portion of a first polymerase chain reaction product formed from the first primary oligonucleotide primer and (b) a second secondary oligonucleotide primer having a 3′ portion that comprises a nucleotide sequence that is complementary to a portion of a first polymerase chain reaction product formed from the first secondary oligonucleotide primer;
blending the first polymerase chain reaction products, the one or more secondary oligonucleotide primer sets, the one or more enzymes capable of digesting deoxyuracil (dU)-containing nucleic acid molecules, a deoxynucleotide mix including dUTP, and a DNA polymerase to form one or more second polymerase chain reaction mixtures;
subjecting the one or more second polymerase chain reaction mixtures to conditions suitable for digesting deoxyuracil (dU)-containing nucleic acid molecules present in the second polymerase chain reaction mixtures and for carrying out two or more polymerase chain reaction cycles comprising a denaturation treatment, a hybridization treatment, and an extension treatment thereby forming second polymerase chain reaction products; and
detecting and distinguishing the second polymerase chain reactions products in the one or more second polymerase chain reaction mixtures to identify the presence of one or more parent nucleic acid molecules containing target nucleotide sequences differing from nucleotide sequences in other parent nucleic acid molecules in the sample by one or more methylated or hydroxymethylated residues.

6. A method for identifying, in a sample, one or more parent nucleic acid molecules containing a target nucleotide sequence differing from nucleotide sequences in other parent nucleic acid molecules in the sample by one or more methylated or hydroxymethylated residues, said method comprising:
providing a sample containing one or more parent nucleic acid molecules potentially containing the target nucleotide sequence differing from the nucleotide sequences in other parent nucleic acid molecules by one or more methylated or hydroxymethylated residues;
subjecting the nucleic acid molecules in the sample to a treatment with one or more DNA repair enzymes and chemicals under conditions suitable to convert methylated and hydroxymethylated cytosine residues to dihydrouracil residues to produce a treated sample;
providing one or more enzymes capable of digesting deoxyuracil (dU)-containing nucleic acid molecules present in the sample;
providing one or more primary oligonucleotide primer sets, each primary oligonucleotide primer set comprising (a) a first primary oligonucleotide primer having a 5′ primer-specific portion and a 3′ portion that comprises a nucleotide sequence that is complementary to a sequence in the parent nucleic acid molecule adjacent to the DNA repair enzyme and chemically-treated target nucleotide sequence containing the one or more converted methylated or hydroxymethylated residue and (b) a second primary oligonucleotide primer having a 5′ primer-specific portion and a 3′ portion that comprises a nucleotide sequence that is complementary to a portion of an extension product formed from the first primary oligonucleotide primer;
blending the treated sample, the one or more first primary oligonucleotide primers of the one or more primary oligonucleotide primer sets, the one or more enzymes capable of digesting deoxyuracil (dU)-containing nucleic acid molecules, a deoxynucleotide mix, and a DNA polymerase to form one or more polymerase extension reaction mixtures;
subjecting the one or more polymerase extension reaction mixtures to conditions suitable for digesting deoxyuracil (dU)-containing nucleic acid molecules present in the polymerase extension reaction mixtures and for carrying out one or more polymerase extension reaction cycles comprising a denaturation treatment, a hybridization treatment, and an extension treatment, thereby forming primary extension products comprising the complement of the DNA repair enzyme and chemically-treated target nucleotide sequence;
blending the one or more polymerase extension reaction mixtures comprising the primary extension products, the one or more second primary oligonucleotide primers of the one or more primary oligonucleotide primer sets, the one or more enzymes capable of digesting deoxyuracil (dU)-containing nucleic acid molecules in the reaction mixture, a deoxynucleotide mix, and a DNA polymerase to form one or more first polymerase chain reaction mixtures;
subjecting the one or more first polymerase chain reaction mixtures to conditions suitable for carrying out one or more first polymerase chain reaction cycles comprising a denaturation treatment, a hybridization treatment, and an extension treatment, thereby forming first polymerase chain reactions products comprising the DNA repair enzyme and chemically-treated target nucleotide sequence or a complement thereof;
providing one or more secondary oligonucleotide primer sets, each secondary oligonucleotide primer set comprising (a) a first secondary oligonucleotide primer comprising the same nucleotide sequence as the 5′ primer-specific portion of the first polymerase chain reaction products or their complements and (b) a second secondary oligonucleotide primer comprising a nucleotide sequence that is complementary to the 3′ primer-specific portion of the first polymerase chain reaction products or their complements;
blending the first polymerase chain reaction products, the one or more secondary oligonucleotide primer sets, the one or more enzymes capable of digesting deoxyuracil (dU)-containing nucleic acid molecules, a deoxynucleotide mix including dUTP, and a DNA polymerase to form one or more second polymerase chain reaction mixtures;
subjecting the one or more second polymerase chain reaction mixtures to conditions suitable for digesting deoxyuracil (dU)-containing nucleic acid molecules present in the second polymerase chain reaction mixtures and for carrying out one or more polymerase chain reaction cycles comprising a denaturation treatment, a hybridization treatment, and an extension treatment thereby forming second polymerase chain reaction products; and
detecting and distinguishing the second polymerase chain reaction products in the one or more second polymerase chain reaction mixtures to identify the presence of one or more parent nucleic acid molecules containing target nucleotide sequences differing from nucleotide sequences in other parent nucleic acid molecules in the sample by one or more methylated or hydroxymethylated residues.

7. The method of any one of claims 1 through 6 further comprising:
contacting the sample with DNA repair enzymes to repair damaged DNA, abasic sites, oxidized bases, or nicks in the DNA.

8. The method of any one of claims 3 through 6 further comprising:
contacting the sample with at least a first methylation sensitive enzyme to form a restriction enzyme reaction mixture prior to, or concurrent with, said blending to form one or more polymerase extension reaction mixtures, wherein said first methylation sensitive enzyme cleaves nucleic acid molecules in the sample that contain one or more unmethylated residues within at least one methylation sensitive enzyme recognition sequence, and whereby said detecting involves detection of one or more parent nucleic acid molecules containing the target nucleotide sequence, wherein said parent nucleic acid molecules originally contained one or more methylated or hydroxymethylated residues.

9. The method of any one of claims 3 through 6 further comprising:
contacting the sample with an immobilized methylated or hydroxymethylated nucleic acid binding protein or antibody to selectively bind and enrich for methylated or hydroxymethylated nucleic acid in the sample.

10. The method of any one of claims 1 through 6, wherein one or more primary or secondary oligonucleotide primers comprises a portion that has no or one nucleotide sequence mismatch when hybridized in a base-specific manner to the target nucleic acid sequence or DNA repair enzyme and chemically-treated methylated or hydroxymethylated nucleic acid sequence or complement sequence thereof, but have one or more additional nucleotide sequence mismatches that interferes with polymerase extension when said primary or secondary oligonucleotide primers hybridize in a base-specific manner to a corresponding nucleotide sequence portion in wild-type nucleic acid sequence or complement sequence thereof.

11. The method of any one of claims 1 through 6, wherein one or both primary oligonucleotide primers of the primary oligonucleotide primer set and/or one or both secondary oligonucleotide primers of the secondary oligonucleotide primer set have a 3′ portion comprising a cleavable nucleotide or nucleotide analogue and a blocking group, such that the 3′ end of said primer or primers is unsuitable for polymerase extension, said method further comprising:
cleaving the cleavable nucleotide or nucleotide analog of one or both oligonucleotide primers during said hybridization treatment, thereby liberating free 3′OH ends on one or both oligonucleotide primers prior to said extension treatment.

12. The method of claim 11, wherein one or more primary or secondary oligonucleotide primers comprises a sequence that differs from the target nucleic acid sequence or DNA repair enzyme and chemically-treated methylated or hydroxymethylated nucleic acid sequence or complement sequence thereof, said difference is located two or three nucleotide bases from the liberated free 3′OH end.

13. The method of claim 11, wherein the cleavable nucleotide comprises one or more RNA bases.

14. The method of any one of claims 1 through 6 further comprising:
providing one or more blocking oligonucleotide primers comprising one or more mismatched bases at the 3′ end or one or more nucleotide analogs and a blocking group at the 3′ end, such that the 3′ end of said blocking oligonucleotide primer is unsuitable for polymerase extension when hybridized in a base-specific manner to wild-type nucleic acid sequence or complement sequence thereof, wherein said blocking oligonucleotide primer comprises a portion having a nucleotide sequence that is the same as a nucleotide sequence portion in the wild-type nucleic acid sequence or complement sequence thereof to which the blocking oligonucleotide primer hybridizes but has one or more nucleotide sequence mismatches to a corresponding nucleotide sequence portion in the target nucleic acid sequence or DNA repair enzyme and chemically-treated methylated or hydroxymethylated nucleic acid sequence or complement sequence thereof and
blending the one or more blocking oligonucleotide primers with the sample or products subsequently produced from the sample prior to a polymerase extension reaction, polymerase chain reaction, or ligation reaction, whereby during the hybridization step said one or more blocking oligonucleotide primers preferentially hybridize in a base-specific manner to a wild-type nucleic acid sequence or complement sequence thereof, thereby interfering with polymerase extension or ligation during reaction of a primer or probes hybridized in a base-specific manner to the wild-type sequence or complement sequence thereof.

15. The method of any one of claim 2 or 5, wherein the first secondary oligonucleotide primer has a 5′ primer-specific portion and the second secondary oligonucleotide primer has a 5′ primer-specific portion, said one or more secondary oligonucleotide primer sets further comprising a third secondary oligonucleotide primer comprising the same nucleotide sequence as the 5′ primer-specific portion of the first secondary oligonucleotide primer and (d) a fourth secondary oligonucleotide primer comprising the same nucleotide sequence as the 5′ primer-specific portion of the second secondary oligonucleotide primer.

16. The method of any one of claim 1, 2, 3 or 5 further comprising:
providing one or more third primary oligonucleotide primers comprising the same nucleotide sequence as the 5′ primer-specific portion of the first or second primary oligonucleotide primer; and
blending the one or more third primary oligonucleotide primers in the one or more first polymerase chain reaction mixtures.

17. The method of any one of claims 3 through 6 further comprising:
providing one or more nucleases capable of digesting nucleic acid molecules present not comprising polymerase-incorporated modified nucleotides;
providing a deoxynucleotide mix that comprises one or more modified nucleotides that protect extension product but not other DNA from nuclease digestion;
blending the sample, the one or more first primary oligonucleotide primers, the one or more enzymes capable of digesting deoxyuracil (dU)-containing nucleic acid molecules, the deoxynucleotide mix that comprises one or more modified nucleotides that protect extension products but not target DNA from nuclease digestion, and a DNA polymerase to form one or more polymerase extension reaction mixtures;
subjecting the one or more polymerase extension reaction mixtures to conditions suitable for digesting deoxyuracil (dU)-containing nucleic acid molecules present in the polymerase extension reaction mixtures and for carrying out one or more polymerase extension reaction cycles comprising a denaturation treatment, a hybridization treatment, and an extension treatment, thereby forming primary extension products comprising modified nucleotide bases and comprising the complement of the target nucleotide sequence;
blending the polymerase extension reaction mixtures comprising the primary extension products, and the one or more nucleases; and
subjecting the one or more polymerase extension reaction mixtures to conditions suitable for digesting nucleic acid molecules present in the polymerase extension reaction mixtures, but not primary extension products comprising modified nucleotides.

18. The method of any one of claims 3 through 6, wherein the DNA repair enzyme is the ten-eleven translocation (TET1) dioxygenase and the chemical treatment is with pyridine-borane.

19. The method of any one of claim 1 or 3, wherein the second oligonucleotide probe of the oligonucleotide probe set further comprises a unitaq detection portion, thereby forming ligated product sequences comprising the 5′ primer-specific portion, the target-specific portions, the unitaq detection portion, and the 3′ primer-specific portion, said method further comprising:
providing one or more unitaq detection probes, wherein each unitaq detection probe hybridizes to a complementary unitaq detection portion and said detection probe comprises a quencher molecule and a detectable label separated from the quencher molecule;
adding the one or more unitaq detection probes to the second polymerase chain reaction mixture; and
hybridizing the one or more unitaq detection probes to complementary unitaq detection portions on the ligated product sequence or complement thereof during said subjecting the second polymerase chain reaction mixture to conditions suitable for one or more polymerase chain reaction cycles, wherein the quencher molecule and the detectable label are cleaved from the one or more unitaq detection probes during the extension treatment and said detecting involves the detection of the cleaved detectable label.

20. The method of any one of claim 2, 4, 5, or 6, wherein one primary oligonucleotide primer or one secondary oligonucleotide primer further comprises a unitaq detection portion, thereby forming extension product sequences comprising the 5′ primer-specific portion, the target-specific portions, the unitaq detection portion, and the complement of the other 5′ primer-specific portion, and complements thereof, said method further comprising:
providing one or more unitaq detection probes, wherein each unitaq detection probe hybridizes to a complementary unitaq detection portion and said detection probe comprises a quencher molecule and a detectable label separated from the quencher molecule;
adding the one or more unitaq detection probes to the one or more polymerase chain reaction mixtures; and
hybridizing the one or more unitaq detection probes to complementary unitaq detection portions on the ligated product sequence or complement thereof during polymerase chain reaction cycles after the first polymerase chain reaction, wherein the quencher molecule and the detectable label are cleaved from the one or more unitaq detection probes during the extension treatment and said detecting involves the detection of the cleaved detectable label.

21. The method of claim 1 or 3, wherein one or both oligonucleotide probes of the oligonucleotide probe set comprises a portion that has no or one nucleotide sequence mismatch when hybridized in a base-specific manner to the target nucleic acid sequence or DNA repair enzyme and chemically-treated methylated or hydroxymethylated nucleic acid sequence or complement sequence thereof, but have one or more additional nucleotide sequence mismatches that interferes with ligation when said oligonucleotide probe hybridizes in a base-specific manner to a corresponding nucleotide sequence portion in the wild-type nucleic acid sequence or complement sequence thereof.

22. The method of any one of claim 1 or 3, wherein the 3′ portion of the first oligonucleotide probe of the oligonucleotide probe set comprises a cleavable nucleotide or nucleotide analogue and a blocking group, such that the 3′ end is unsuitable for polymerase extension or ligation, said method further comprising;
cleaving the cleavable nucleotide or nucleotide analog of the first oligonucleotide probe when said probe is hybridized to its complementary target nucleotide sequence of the primary extension product, thereby liberating a 3′OH on the first oligonucleotide probe prior to said ligating.

23. The method of claim 22, wherein one or more first oligonucleotide probe of the oligonucleotide probe set comprises a sequence that differs from the target nucleic acid sequence or DNA repair enzyme and chemically-treated methylated or hydroxymethylated nucleic acid sequence or complement sequence thereof, said difference is located two or three nucleotide bases from the liberated free 3′OH end.

24. The method of any one of claim 1 or 3, wherein the second oligonucleotide probe has, at its 5′ end, an overlapping identical nucleotide with the 3′ end of the first oligonucleotide probe, and, upon hybridization of the first and second oligonucleotide probes of a probe set at adjacent positions on a complementary target nucleotide sequence of a primary extension product to form a junction, the overlapping identical nucleotide of the second oligonucleotide probe forms a flap at the junction with the first oligonucleotide probe, said method further comprising:
cleaving the overlapping identical nucleotide of the second oligonucleotide probe with an enzyme having 5′ nuclease activity thereby liberating a phosphate at the 5′ end of the second oligonucleotide probe prior to said ligating.

25. The method of any one of claim 1 or 3, wherein the one or more oligonucleotide probe sets further comprise a third oligonucleotide probe having a target-specific portion, wherein the second and third oligonucleotide probes of a probe set are configured to hybridize adjacent to one another on the target nucleotide sequence with a junction between them to allow ligation between the second and third oligonucleotide probes to form a ligated product sequence comprising the first, second, and third oligonucleotide probes of a probe set.

26. The method of any one of claims 1 through 25, wherein the sample is selected from the group consisting of tissue, cells, serum, blood, plasma, amniotic fluid, sputum, urine, bodily fluids, bodily secretions, bodily excretions, cell-free circulating nucleic acids, cell-free circulating tumor nucleic acids, cell-free circulating fetal nucleic acids in pregnant woman, circulating tumor cells, tumor, tumor biopsy, and exosomes.

27. The method of any one of claims 1 through 25, wherein the one or more target nucleotide sequences are low-abundance nucleic acid molecules comprising one or more nucleotide base mutations, insertions, deletions, translocations, splice variants, mRNA, lncRNA, ncRNA, miRNA variants, alternative transcripts, alternative start sites, alternative coding sequences, alternative non-coding sequences, alternative splicing, exon insertions, exon deletions, intron insertions, or other rearrangement at the genome level and/or methylated or hydroxymethylated nucleotide bases.

28. The method of claim 27, wherein the low-abundance nucleic acid molecules have one or more nucleotide base mutations, insertions, deletions, translocations, splice variants, mRNA, lncRNA, ncRNA, miRNA variants, alternative transcripts, alternative start sites, alternative coding sequences, alternative non-coding sequences, alternative splicings, exon insertions, exon deletions, intron insertions, or other rearrangement at the genome level, and/or methylated or hydroxymethylated nucleotide bases are identified and distinguished from a high-abundance of nucleic acid molecules in the sample having a similar nucleotide sequence as the low abundance nucleic acid molecules but without the one or more nucleotide base mutations, insertions, deletions, translocations, splice variants, mRNA, lncRNA, ncRNA, miRNA variants, alternative transcripts, alternative start sites, alternative coding sequences, alternative non-coding sequences, alternative splicing, exon insertions, exon deletions, intron insertions, or other rearrangement at the genome level, and/or methylated or hydroxymethylated nucleotide bases.

29. The method of claim 28, wherein the copy number of one or more low-abundance target nucleotide sequences are quantified relative to the copy number of the high-abundance nucleic acid molecules in the sample.

30. The method of any one of claims 1 through 25, wherein the one or more target nucleotide sequences are quantified or enumerated.

31. The method of claim 30, wherein the one or more target nucleotide sequences are quantified or enumerated relative to other nucleotide sequences in the sample or other samples undergoing the identical subsequent steps.

32. The method of claim 31, wherein the relative copy number of one or more target nucleotide sequences are quantified or enumerated.

33. The method of any one of claims 1 through 25 further comprising:
diagnosing or prognosing a disease state based on said identifying.

34. The method of any one of claims 1 through 25 further comprising:
distinguishing a genotype or disease predisposition based on said identifying.

35. A method of diagnosing or prognosing a disease state of cells or tissue based on identifying the presence or level of a plurality of disease-specific and/or cell/tissue-specific DNA, RNA, and/or protein markers in a biological sample of an individual, wherein the plurality of markers is in a set comprising from 6-12 markers, 12-24 markers, 24-36 markers, 36-48 markers, 48-72 markers, 72-96 markers, or >96 markers, wherein each marker in a given set is selected by having any one or more of the following criteria:
present, or above a cutoff level, in >50% of biological samples of the disease cells or tissue from individuals diagnosed with the disease state;
absent, or below a cutoff level, in >95% of biological samples of the normal cells or tissue from individuals without the disease state;
present, or above a cutoff level, in >50% of biological samples comprising cells, serum, blood, plasma, amniotic fluid, sputum, urine, bodily fluids, bodily secretions, bodily excretions, or fractions thereof, from individuals diagnosed with the disease state;
absent, or below a cutoff level, in >95% of biological samples comprising cells, serum, blood, plasma, amniotic fluid, sputum, urine, bodily fluids, bodily secretions, bodily excretions, or fractions thereof, from individuals without the disease state;
present with a z-value of >1.65 in the biological sample comprising cells, serum, blood, plasma, amniotic fluid, sputum, urine, bodily fluids, bodily secretions, bodily excretions, or fractions thereof, from individuals diagnosed with the disease state;
and, wherein at least 50% of the markers in a set each comprise one or more methylated or hydroxymethylated residues, and/or wherein at least 50% of the markers in a set that are present, or above a cutoff level, or present with a z-value of >1.65 comprise of one or more methylated or hydroxymethylated residues, in the biological sample comprising cells, serum, blood, plasma, amniotic fluid, sputum, urine, bodily fluids, bodily secretions, bodily excretions, or fractions thereof, from at least 50% of individuals diagnosed with the disease state, said method comprising:
obtaining the biological sample including cell-free DNA, RNA, and/or protein originating from the cells or tissue and from one or more other tissues or cells, wherein the biological sample is selected from the group consisting of cells, serum, blood, plasma, amniotic fluid, sputum, urine, bodily fluids, bodily secretions, and bodily excretions, or fractions thereof;
fractionating the sample into one or more fractions, wherein at least one fraction comprises exosomes, tumor-associated vesicles, other protected states, or cell-free DNA, RNA, and/or protein;
subjecting nucleic acid molecules in one or more fractions to a treatment with one or more DNA repair enzymes and chemicals under conditions suitable to convert methylated and hydroxymethylated cytosine residues to dihydrouracil residues;
carrying out at least one enrichment step for 50% or more disease-specific and/or cell/tissue-specific DNA, RNA, and/or protein markers during either said fractionating and/or by carrying out a nucleic acid amplification step; and
performing one or more assays to detect and distinguish the plurality of disease-specific and/or cell/tissue-specific DNA, RNA, and/or protein markers, thereby identifying their presence or levels in the sample, wherein individuals are diagnosed or prognosed with the disease state if a minimum of 2 or 3 markers are present or above a cutoff level in a marker set comprising from 6-12 markers; or a minimum of 3, 4, or 5 markers are present or above a cutoff level in a marker set comprising from 12-24 markers; or a minimum of 3, 4, 5, or 6 markers are present or above a cutoff level in a marker set comprising from 24-36 markers; or a minimum of 4, 5, 6, 7, or 8 markers are present or above a cutoff level in a marker set comprising from 36-48 markers; or a minimum of 6, 7, 8, 9, 10, 11, or 12 markers are present or above a cutoff level in a marker set comprising from 48-72 markers, or a minimum of 7, 8, 9, 10, 11, 12 or 13 markers are present or above a cutoff level in a marker set comprising from 72-96 markers, or a minimum of 8, 9, 10, 11, 12, 13 or “n”/12 markers are present or above a cutoff level in a marker set comprising 96 to “n” markers, when “n”>168 markers.

36. A method of diagnosing or prognosing a disease state of a solid tissue cancer including colorectal adenocarcinoma, stomach adenocarcinoma, esophageal carcinoma, breast lobular and ductal carcinoma, uterine corpus endometrial carcinoma, ovarian serous cystadenocarcinoma, cervical squamous cell carcinoma and adenocarcinoma, uterine carcinosarcoma, lung adenocarcinoma, lung squamous cell carcinoma, head & neck squamous cell carcinoma, prostate adenocarcinoma, invasive urothelial bladder cancer, liver hepatoceullular carcinoma, pancreatic ductal adenocarcinoma, or gallbladder adenocarcinoma, based on identifying the presence or level of a plurality of disease-specific and/or cell/tissue-specific DNA, RNA, and/or protein markers in a biological sample of an individual, wherein the plurality of markers is in a set comprising from 48-72 total cancer markers, 72-96 total cancer markers or ≥96 total cancer markers, wherein on average greater than one quarter such markers in a given set cover each of the aforementioned major cancers being tested, wherein each marker in a given set for a given solid tissue cancer is selected by having any one or more of the following criteria for that solid tissue cancer:
present, or above a cutoff level, in >50% of biological samples of a given cancer tissue from individuals diagnosed with a given solid tissue cancer;
absent, or below a cutoff level, in >95% of biological samples of the normal tissue from individuals without that given solid tissue cancer;
present, or above a cutoff level, in >50% of biological samples comprising cells, serum, blood, plasma, amniotic fluid, sputum, urine, bodily fluids, bodily secretions, bodily excretions, or fractions thereof, from individuals diagnosed with a given solid tissue cancer;
absent, or below a cutoff level, in >95% of biological samples comprising cells, serum, blood, plasma, amniotic fluid, sputum, urine, bodily fluids, bodily secretions, bodily excretions, or fractions thereof, from individuals without that given solid tissue cancer;
present with a z-value of >1.65 in the biological sample comprising cells, serum, blood, plasma, amniotic fluid, sputum, urine, bodily fluids, bodily secretions, bodily excretions, or fractions thereof, from individuals diagnosed with a given solid tissue cancer;
and, wherein at least 50% of the markers in a set each comprise of one or more methylated residues, and/or wherein at least 50% of the markers in a set that are present, or above a cutoff level, or present with a z-value of >1.65 comprise of one or more methylated residues, in the biological sample comprising cells, serum, blood, plasma, amniotic fluid, sputum, urine, bodily fluids, bodily secretions, bodily excretions, or fractions thereof, from at least 50% of individuals diagnosed with a given solid tissue cancer, said method comprising:
obtaining a biological sample, the biological sample including cell-free DNA, RNA, and/or protein originating from the cells or tissue and from one or more other tissues or cells, wherein the biological sample is selected from the group consisting of cells, serum, blood, plasma, amniotic fluid, sputum, urine, bodily fluids, bodily secretions, and bodily excretions, or fractions thereof;
fractionating the sample into one or more fractions, wherein at least one fraction comprises exosomes, tumor-associated vesicles, other protected states, or cell-free DNA, RNA, and/or protein;
subjecting the nucleic acid molecules in one or more fractions to a treatment with one or more DNA repair enzymes and chemicals under conditions suitable to convert methylated and hydroxymethylated cytosine residues to dihydrouracil residues;
carrying out at least one enrichment step for 50% or more disease-specific and/or cell/tissue-specific DNA, RNA, and/or protein markers during either said fractionating and/or by caning out a nucleic acid amplification step; and
performing one or more assays to detect and distinguish the plurality of cancer-specific and/or cell/tissue-specific DNA, RNA, and/or protein markers, thereby identifying their presence or levels in the sample, wherein individuals are diagnosed or prognosed with a solid-tissue cancer if a minimum of 4 markers are present or are above a cutoff level in a marker set comprising from 48-72 total cancer markers; or a minimum of 5 markers are present or are above a cutoff level in a marker set comprising from 72-96 total cancer markers; or a minimum of 6 or “n”/18 markers are present or are above a cutoff level in a marker set comprising 96 to “n” total cancer markers, when “n”>96 total cancer markers.

37. The method of claim 36, wherein each marker in a given set for a given solid tissue cancer is selected by having any one or more of the following criteria for that solid tissue cancer:
present, or above a cutoff level, in >66% of biological samples of a given cancer tissue from individuals diagnosed with a given solid tissue cancer;
absent, or below a cutoff level, in >95% of biological samples of the normal tissue from individuals without that given solid tissue cancer;
present, or above a cutoff level, in >66% of biological samples comprising cells, serum, blood, plasma, amniotic fluid, sputum, urine, bodily fluids, bodily secretions, bodily excretions, or fractions thereof, from individuals diagnosed with a given solid tissue cancer;
absent, or below a cutoff level, in >95% of biological samples comprising cells, serum, blood, plasma, amniotic fluid, sputum, urine, bodily fluids, bodily secretions, bodily excretions, or fractions thereof, from individuals without that given solid tissue cancer;
present with a z-value of >1.65 in the biological sample comprising cells, serum, blood, plasma, amniotic fluid, sputum, urine, bodily fluids, bodily secretions, bodily excretions, or fractions thereof, from individuals diagnosed with a given solid tissue cancer.

38. A method of diagnosing or prognosing a disease state of and identifying the most likely specific tissue(s) of origin of a solid tissue cancer in the following groups: Group 1 (colorectal adenocarcinoma, stomach adenocarcinoma, esophageal carcinoma); Group 2 (breast lobular and ductal carcinoma, uterine corpus endometrial carcinoma, ovarian serous cystadenocarcinoma, cervical squamous cell carcinoma and adenocarcinoma, uterine carcinosarcoma); Group 3 (lung adenocarcinoma, lung squamous cell carcinoma, head & neck squamous cell carcinoma); Group 4 (prostate adenocarcinoma, invasive urothelial bladder cancer); and/or Group 5 (liver hepatoceullular carcinoma, pancreatic ductal adenocarcinoma, or gallbladder adenocarcinoma) based on identifying the presence or level of a plurality of disease-specific and/or cell/tissue-specific DNA, RNA, and/or protein markers in a biological sample of an individual, wherein the plurality of markers is in a set comprising from 36-48 group-specific cancer markers, 48-64 group-specific cancer markers or ≥64 group-specific cancer markers, wherein on average greater than one third such markers in a given set cover each of the aforementioned cancers being tested within that group, wherein each marker in a given set for a given solid tissue cancer is selected by having any one or more of the following criteria for that solid tissue cancer:
present, or above a cutoff level, in >50% of biological samples of a given cancer tissue from individuals diagnosed with a given solid tissue cancer;
absent, or below a cutoff level, in >95% of biological samples of the normal tissue from individuals without that given solid tissue cancer;
present, or above a cutoff level, in >50% of biological samples comprising cells, serum, blood, plasma, amniotic fluid, sputum, urine, bodily fluids, bodily secretions, bodily excretions, or fractions thereof, from individuals diagnosed with a given solid tissue cancer;
absent, or below a cutoff level, in >95% of biological samples comprising cells, serum, blood, plasma, amniotic fluid, sputum, urine, bodily fluids, bodily secretions, bodily excretions, or fractions thereof, from individuals without that given solid tissue cancer;
present with a z-value of >1.65 in the biological sample comprising cells, serum, blood, plasma, amniotic fluid, sputum, urine, bodily fluids, bodily secretions, bodily excretions, or fractions thereof, from individuals diagnosed with a given solid tissue cancer;
and, wherein at least 50% of the markers in a set each comprise one or more methylated residues, and/or wherein at least 50% of the markers in a set that are present, or above a cutoff level, or present with a z-value of >1.65 comprise one or more methylated residues, in the biological sample comprising cells, serum, blood, plasma, amniotic fluid, sputum, urine, bodily fluids, bodily secretions, bodily excretions, or fractions thereof, from at least 50% of individuals diagnosed with a given solid tissue cancer, said method comprising:
obtaining the biological sample, the biological sample including cell-free DNA, RNA, and/or protein originating from the cells or tissue and from one or more other tissues or cells, wherein the biological sample is selected from the group consisting of cells, serum, blood, plasma, amniotic fluid, sputum, urine, bodily fluids, bodily secretions, bodily excretions, or fractions thereof;
fractionating the sample into one or more fractions, wherein at least one fraction comprises exosomes, tumor-associated vesicles, other protected states, or cell-free DNA, RNA, and/or protein;
subjecting the nucleic acid molecules in one or more fractions to a treatment with one or more DNA repair enzymes and chemicals under conditions suitable to convert methylated and hydroxymethylated cytosine residues to dihydrouracil residues;
carrying out at least one enrichment step for 50% or more disease-specific and/or cell/tissue-specific DNA, RNA, and/or protein markers during either said fractionating and/or by carrying out a nucleic acid amplification step; and
performing one or more assays to detect and distinguish the plurality of cancer-specific and/or cell/tissue-specific DNA, RNA, and/or protein markers, thereby identifying their presence or levels in the sample, wherein individuals are diagnosed or prognosed with a solid-tissue cancer if a minimum of 4 markers are present or are above a cutoff level in a marker set comprising from 36-48 group-specific cancer markers; or a minimum of 5 markers are present or are above a cutoff level in a marker set comprising from 48-64 group-specific cancer markers; or a minimum of 6 or “n”/12 markers are present or are above a cutoff level in a marker set comprising 64 to “n” group-specific cancer markers, when “n”>64 group-specific cancer markers.

39. The method of claim 38, wherein each marker in a given set for a given solid tissue cancer is selected by having any one or more of the following criteria for that solid tissue cancer:
present, or above a cutoff level, in >66% of biological samples of a given cancer tissue from individuals diagnosed with a given solid tissue cancer;
absent, or below a cutoff level, in >95% of biological samples of the normal tissue from individuals without that given solid tissue cancer;
present, or above a cutoff level, in >66% of biological samples comprising cells, serum, blood, plasma, amniotic fluid, sputum, urine, bodily fluids, bodily secretions, bodily excretions, or fractions thereof, from individuals diagnosed with a given solid tissue cancer;
absent, or below a cutoff level, in >95% of biological samples comprising cells, serum, blood, plasma, amniotic fluid, sputum, urine, bodily fluids, bodily secretions, bodily excretions, or fractions thereof, from individuals without that given solid tissue cancer;
present with a z-value of >1.65 in the biological sample comprising cells, serum, blood, plasma, amniotic fluid, sputum, urine, bodily fluids, bodily secretions, bodily excretions, or fractions thereof, from individuals diagnosed with a given solid tissue cancer.

40. A method of diagnosing or prognosing a disease state of a gastrointestinal cancer including colorectal adenocarcinoma, stomach adenocarcinoma, or esophageal carcinoma, based on identifying the presence or level of a plurality of disease-specific and/or cell/tissue-specific DNA, RNA, and/or protein markers in a biological sample of an individual, wherein the plurality of markers is in a set comprising from 6-12 markers, 12-18 markers, 18-24 markers, 24-36 markers, 36-48 markers or ≥48 markers, wherein each marker is selected by having any one or more of the following criteria for gastrointestinal cancer:
present, or above a cutoff level, in >75% of biological samples of a given cancer tissue from individuals diagnosed with gastrointestinal cancer;
absent, or below a cutoff level, in >95% of biological samples of the normal tissue from individuals without gastrointestinal cancer;
present, or above a cutoff level, in >75% of biological samples comprising cells, serum, blood, plasma, amniotic fluid, sputum, urine, bodily fluids, bodily secretions, bodily excretions, or fractions thereof, from individuals diagnosed with gastrointestinal cancer;
absent, or below a cutoff level, in >95% of biological samples comprising cells, serum, blood, plasma, amniotic fluid, sputum, urine, bodily fluids, bodily secretions, bodily excretions, or fractions thereof, from individuals without gastrointestinal cancer;
present with a z-value of >1.65 in the biological sample comprising cells, serum, blood, plasma, amniotic fluid, sputum, urine, bodily fluids, bodily secretions, bodily excretions, or fractions thereof, from individuals diagnosed with gastrointestinal cancer;
and, wherein at least 50% of the markers in a set each comprise one or more methylated residues, and/or wherein at least 50% of the markers in a set that are present, or above a cutoff level, or present with a z-value of >1.65 comprise one or more methylated residues, in the biological sample comprising cells, serum, blood, plasma, amniotic fluid, sputum, urine, bodily fluids, bodily secretions, bodily excretions, or fractions thereof, from at least 50% of individuals diagnosed with gastrointestinal cancer, said method comprising:
obtaining the biological sample, the biological sample including cell-free DNA, RNA, and/or protein originating from the cells or tissue and from one or more other tissues or cells, wherein the biological sample is selected from the group consisting of cells, serum, blood, plasma, amniotic fluid, sputum, urine, bodily fluids, bodily secretions, bodily excretions, or fractions thereof;
fractionating the sample into one or more fractions, wherein at least one fraction comprises exosomes, tumor-associated vesicles, other protected states, or cell-free DNA, RNA, and/or protein;
subjecting the nucleic acid molecules in one or more fractions to a treatment with one or more DNA repair enzymes and chemicals under conditions suitable to convert methylated and hydroxymethylated cytosine residues to dihydrouracil residues;
carrying out at least one enrichment step for 50% or more disease-specific and/or cell/tissue-specific DNA, RNA, and/or protein markers during either said fractionating and/or by carrying out a nucleic acid amplification step; and
performing one or more assays to detect and distinguish the plurality of cancer-specific and/or cell/tissue-specific DNA, RNA, and/or protein markers, thereby identifying their presence or levels in the sample, wherein individuals are diagnosed or prognosed with gastrointestinal cancer if a minimum of 2, 3 or 4 markers are present or are above a cutoff level in a marker set comprising from 6-12 markers; or a minimum of 2, 3, 4, or 5 markers are present or are above a cutoff level in a marker set comprising from 12-18 markers; or a minimum of 3, 4, 5, or 6 markers are present or are above a cutoff level in a marker set comprising from 18-24 markers; or a minimum of 3, 4, 5, 6, 7, or 8 markers are present or are above a cutoff level in a marker set comprising from 24-36 markers; or a minimum of 4, 5, 6, 7, 8, 9, or 10 markers are present or are above a cutoff level in a marker set comprising from 36-48 markers; or a minimum of 5, 6, 7, 8, 9, 10, 11, 12, or “n”/12 markers are present or are above a cutoff level in a marker set comprising 48 to “n” markers, when “n”>48 markers.

41. A method of diagnosing or prognosing a disease state of a solid tissue cancer including colorectal adenocarcinoma, stomach adenocarcinoma, esophageal carcinoma, breast lobular and ductal carcinoma, uterine corpus endometrial carcinoma, ovarian serous cystadenocarcinoma, cervical squamous cell carcinoma and adenocarcinoma, uterine carcinosarcoma, lung adenocarcinoma, lung squamous cell carcinoma, head & neck squamous cell carcinoma, prostate adenocarcinoma, invasive urothelial bladder cancer, liver hepatoceullular carcinoma, pancreatic ductal adenocarcinoma, or gallbladder adenocarcinoma, based on identifying the presence or level of a plurality of disease-specific and/or cell/tissue-specific DNA, RNA, and/or protein markers in a biological sample of an individual, wherein the plurality of markers is in a set comprising from 36-48 total cancer markers, 48-64 total cancer markers, or ≥64 total cancer markers, wherein on average greater than half of such markers in a given set cover each of the aforementioned major cancers being tested, wherein each marker in a given set for a given solid tissue cancer is selected by having any one or more of the following criteria for that solid tissue cancer:
present, or above a cutoff level, in >75% of biological samples of a given cancer tissue from individuals diagnosed with a given solid tissue cancer;
absent, or below a cutoff level, in >95% of biological samples of the normal tissue from individuals without that given solid tissue cancer;
present, or above a cutoff level, in >75% of biological samples comprising cells, serum, blood, plasma, amniotic fluid, sputum, urine, bodily fluids, bodily secretions, bodily excretions, or fractions thereof, from individuals diagnosed with a given solid tissue cancer;
absent, or below a cutoff level, in >95% of biological samples comprising cells, serum, blood, plasma, amniotic fluid, sputum, urine, bodily fluids, bodily secretions, bodily excretions, or fractions thereof, from individuals without that given solid tissue cancer;
present with a z-value of >1.65 in the biological sample comprising cells, serum, blood, plasma, amniotic fluid, sputum, urine, bodily fluids, bodily secretions, bodily excretions, or fractions thereof, from individuals diagnosed with a given solid tissue cancer;
and, wherein at least 50% of the markers in a set each comprise one or more methylated residues, and/or wherein at least 50% of the markers in a set that are present, or above a cutoff level, or present with a z-value of >1.65 comprise one or more methylated residues, in the biological sample comprising cells, serum, blood, plasma, amniotic fluid, sputum, urine, bodily fluids, bodily secretions, bodily excretions, or fractions thereof, from at least 50% of individuals diagnosed with a given solid tissue cancer, said method comprising:
obtaining the biological sample, the biological sample including cell-free DNA, RNA, and/or protein originating from the cells or tissue and from one or more other tissues or cells, wherein the biological sample is selected from the group consisting of cells, serum, blood, plasma, amniotic fluid, sputum, urine, bodily fluids, bodily secretions, bodily excretions, or fractions thereof;
fractionating the sample into one or more fractions, wherein at least one fraction comprises exosomes, tumor-associated vesicles, other protected states, or cell-free DNA, RNA, and/or protein;
subjecting the nucleic acid molecules in one or more fractions to a treatment with one or more DNA repair enzymes and chemicals under conditions suitable to convert methylated and hydroxymethylated cytosine residues to dihydrouracil residues;
carrying out at least one enrichment step for 50% or more disease-specific and/or cell/tissue-specific DNA, RNA, and/or protein markers during either said fractionating step and/or carrying out a nucleic acid amplification step; and
preforming one or more assays to detect and distinguish the plurality of cancer-specific and/or cell/tissue-specific DNA, RNA, and/or protein markers, thereby identifying their presence or levels in the sample, wherein individuals are diagnosed or prognosed with a solid-tissue cancer if a minimum of 4 markers are present or are above a cutoff level in a marker set comprising from 36-48 total cancer markers; or a minimum of 5 markers are present or are above a cutoff level in a marker set comprising from 48-64 total cancer markers; or a minimum of 6 or “n”/12 markers are present or are above a cutoff level in a marker set comprising 64 to “n” total cancer markers, when “n”>64 total cancer markers.

42. A method of diagnosing or prognosing a disease state of and identifying the most likely specific tissue(s) of origin of a solid tissue cancer in the following groups: Group 1 (colorectal adenocarcinoma, stomach adenocarcinoma, esophageal carcinoma); Group 2 (breast lobular and ductal carcinoma, uterine corpus endometrial carcinoma, ovarian serous cystadenocarcinoma, cervical squamous cell carcinoma and adenocarcinoma, uterine carcinosarcoma); Group 3 (lung adenocarcinoma, lung squamous cell carcinoma, head & neck squamous cell carcinoma); Group 4 (prostate adenocarcinoma, invasive urothelial bladder cancer); and/or Group 5 (liver hepatoceullular carcinoma, pancreatic ductal adenocarcinoma, or gallbladder adenocarcinoma) based on identifying the presence or level of a plurality of disease-specific and/or cell/tissue-specific DNA, RNA, and/or protein markers in a biological sample of an individual, wherein the plurality of markers is in a set comprising from 24-36 group-specific cancer markers, 36-48 group-specific cancer markers, or ≥48 group-specific cancer markers, wherein on average greater than one half of such markers in a given set cover each of the aforementioned cancers being tested within that group, wherein each marker in a given set for a given solid tissue cancer is selected by having any one or more of the following criteria for that solid tissue cancer:
present, or above a cutoff level, in >75% of biological samples of a given cancer tissue from individuals diagnosed with a given solid tissue cancer;
absent, or below a cutoff level, in >95% of biological samples of the normal tissue from individuals without that given solid tissue cancer;
present, or above a cutoff level, in >75% of biological samples comprising cells, serum, blood, plasma, amniotic fluid, sputum, urine, bodily fluids, bodily secretions, bodily excretions, or fractions thereof, from individuals diagnosed with a given solid tissue cancer;
absent, or below a cutoff level, in >95% of biological samples comprising cells, serum, blood, plasma, amniotic fluid, sputum, urine, bodily fluids, bodily secretions, bodily excretions, or fractions thereof, from individuals without that given solid tissue cancer;
present with a z-value of >1.65 in the biological sample comprising cells, serum, blood, plasma, amniotic fluid, sputum, urine, bodily fluids, bodily secretions, bodily excretions, or fractions thereof, from individuals diagnosed with a given solid tissue cancer;
and, wherein at least 50% of the markers in a set each comprise one or more methylated residues, and/or wherein at least 50% of the markers in a set that are present, or above a cutoff level, or present with a z-value of >1.65 comprise one or more methylated residues, in the biological sample comprising cells, serum, blood, plasma, amniotic fluid, sputum, urine, bodily fluids, bodily secretions, bodily excretions, or fractions thereof, from at least 50% of individuals diagnosed with a given solid tissue cancer, said method comprising:
obtaining the biological sample, the biological sample including cell-free DNA, RNA, and/or protein originating from the cells or tissue and from one or more other tissues or cells, wherein the biological sample is selected from the group consisting of cells, serum, blood, plasma, amniotic fluid, sputum, urine, bodily fluids, bodily secretions, bodily excretions;
fractionating the sample into one or more fractions, wherein at least one fraction comprises exosomes, tumor-associated vesicles, other protected states, or cell-free DNA, RNA, and/or protein;
subjecting the nucleic acid molecules in one or more fractions to a treatment with one or more DNA repair enzymes and chemicals under conditions suitable to convert methylated and hydroxymethylated cytosine residues to dihydrouracil residues;
carrying out at least one enrichment step for 50% or more disease-specific and/or cell/tissue-specific DNA, RNA, and/or protein markers during either said fractionating step and/or by carrying out a nucleic acid amplification step; and
performing one or more assays to detect and distinguish the plurality of cancer-specific and/or cell/tissue-specific DNA, RNA, and/or protein markers, thereby identifying their presence or levels in the sample, wherein individuals are diagnosed or prognosed with a solid-tissue cancer if a minimum of 4 markers are present or are above a cutoff level in a marker set comprising from 24-36 group-specific cancer markers; or a minimum of 5 markers are present or are above a cutoff level in a marker set comprising from 36-48 group-specific cancer markers; or a minimum of 6 or “n”/8 markers are present or are above a cutoff level in a marker set comprising 48 to “n” group-specific cancer markers, when “n”>48 group-specific cancer markers.

43. A method of diagnosing or prognosing a disease state to guide and monitor treatment of a solid tissue cancer in one or more of the following groups: Group 1 (colorectal adenocarcinoma, stomach adenocarcinoma, esophageal carcinoma); Group 2 (breast lobular and ductal carcinoma, uterine corpus endometrial carcinoma, ovarian serous cystadenocarcinoma, cervical squamous cell carcinoma and adenocarcinoma, uterine carcinosarcoma); Group 3 (lung adenocarcinoma, lung squamous cell carcinoma, head & neck squamous cell carcinoma); Group 4 (prostate adenocarcinoma, invasive urothelial bladder cancer); and/or Group 5 (liver hepatoceullular carcinoma, pancreatic ductal adenocarcinoma, or gallbladder adenocarcinoma) based on identifying the presence or level of a plurality of disease-specific and/or cell/tissue-specific DNA, RNA, and/or protein markers in a biological sample of an individual, wherein the plurality of markers is in a set comprising from 24-36 group-specific cancer markers, 36-48 group-specific cancer markers, or ≥48 group-specific cancer markers, wherein on average greater than one half of such markers in a given set cover each of the aforementioned cancers being tested within that group, wherein each marker in a given set for a given solid tissue cancer is selected by having any one or more of the following criteria for that solid tissue cancer:
present, or above a cutoff level, in >75% of biological samples of a given cancer tissue from individuals diagnosed with a given solid tissue cancer;
absent, or below a cutoff level, in >95% of biological samples of the normal tissue from individuals without that given solid tissue cancer;
present, or above a cutoff level, in >75% of biological samples comprising cells, serum, blood, plasma, amniotic fluid, sputum, urine, bodily fluids, bodily secretions, bodily excretions, or fractions thereof, from individuals diagnosed with a given solid tissue cancer;
absent, or below a cutoff level, in >95% of biological samples comprising cells, serum, blood, plasma, amniotic fluid, sputum, urine, bodily fluids, bodily secretions, bodily excretions, or fractions thereof, from individuals without that given solid tissue cancer;
present with a z-value of >1.65 in the biological sample comprising cells, serum, blood, plasma, amniotic fluid, sputum, urine, bodily fluids, bodily secretions, bodily excretions, or fractions thereof, from individuals diagnosed with a given solid tissue cancer:
and, wherein at least 50% of the markers in a set each comprise of one or more methylated residues, and/or wherein at least 50% of the markers in a set that are present, or above a cutoff level, or present with a z-value of >1.65 comprise of one or more methylated residues, in the biological sample comprising cells, serum, blood, plasma, amniotic fluid, sputum, urine, bodily fluids, bodily secretions, bodily excretions, or fractions thereof, from at least 50% of individuals diagnosed with a given solid tissue cancer, said method comprising:
obtaining the biological sample, the biological sample including cell-free DNA, RNA, and/or protein originating from the cells or tissue and from one or more other tissues or cells, wherein the biological sample is selected from the group consisting of cells, serum, blood, plasma, amniotic fluid, sputum, urine, bodily fluids, bodily secretions, bodily excretions, or fractions thereof;
fractionating the sample into one or more fractions, wherein at least one fraction comprises exosomes, tumor-associated vesicles, other protected states, or cell-free DNA, RNA, and/or protein;
subjecting the nucleic acid molecules in one or more fractions to a treatment with one or more DNA repair enzymes and chemicals under conditions suitable to convert methylated and hydroxymethylated cytosine residues to dihydrouracil residues;
carrying out at least one enrichment step for 50% or more disease-specific and/or cell/tissue-specific DNA, RNA, and/or protein markers during either said fractionating step and/or by carrying out a nucleic acid amplification step; and
performing one or more assays to detect and distinguish the plurality of cancer-specific and/or cell/tissue-specific DNA, RNA, and/or protein markers, thereby identifying their presence or levels in the sample, wherein individuals with a given tissue-specific cancer will on average have from approximately one-quarter to about one-half or more of the markers scored as present, or are above a cutoff level in the tested marker set, wherein to guide and monitor subsequent treatment, a portion or all of the identified markers scored as present or the identified markers scored as above a cutoff level in the tested marker set are deemed the “patient-specific marker set”, and retested on a subsequent biological sample from the individual during the treatment protocol, to monitor for loss of marker signal, wherein if a minimum of 3 markers remain present or remain above a cutoff level in a patient-specific marker set comprising from 12-24 markers; or if a minimum of 4 markers remain present or remain above a cutoff level in a patient-specific marker set comprising from 24-36 markers; or a minimum of 5 markers remain present or remain above a cutoff level in a patient-specific marker set comprising from 36-48 markers; or a minimum of 6 or “n”/8 markers remain present or remain above a cutoff level in a patient-specific marker set comprising 48 to “n” markers, when “n”>48 markers after the treatment protocol has been administered, then the continuing presence of said markers may guide a decision to change the cancer treatment therapy.

44. A method of diagnosing or prognosing a disease state to monitor for recurrence of a solid tissue cancer in one or more of the following groups: Group 1 (colorectal adenocarcinoma, stomach adenocarcinoma, esophageal carcinoma); Group 2 (breast lobular and ductal carcinoma, uterine corpus endometrial carcinoma, ovarian serous cystadenocarcinoma, cervical squamous cell carcinoma and adenocarcinoma, uterine carcinosarcoma); Group 3 (lung adenocarcinoma, lung squamous cell carcinoma, head & neck squamous cell carcinoma); Group 4 (prostate adenocarcinoma, invasive urothelial bladder cancer); and/or Group 5 (liver hepatoceullular carcinoma, pancreatic ductal adenocarcinoma, or gallbladder adenocarcinoma) based on identifying the presence or level of a plurality of disease-specific and/or cell/tissue-specific DNA, RNA, and/or protein markers in a biological sample of an individual, wherein the plurality of markers is in a set comprising from 24-36 group-specific cancer markers, 36-48 group-specific cancer markers, or ≥48 group-specific cancer markers, wherein on average greater than one half of such markers in a given set cover each of the aforementioned cancers being tested within that group, wherein each marker in a given set for a given solid tissue cancer is selected by having any one or more of the following criteria for that solid tissue cancer:
present, or above a cutoff level, in >75% of biological samples of a given cancer tissue from individuals diagnosed with a given solid tissue cancer;
absent, or below a cutoff level, in >95% of biological samples of the normal tissue from individuals without that given solid tissue cancer;
present, or above a cutoff level, in >75% of biological samples comprising cells, serum, blood, plasma, amniotic fluid, sputum, urine, bodily fluids, bodily secretions, bodily excretions, or fractions thereof, from individuals diagnosed with a given solid tissue cancer;
absent, or below a cutoff level, in >95% of biological samples comprising cells, serum, blood, plasma, amniotic fluid, sputum, urine, bodily fluids, bodily secretions, bodily excretions, or fractions thereof, from individuals without that given solid tissue cancer;
present with a z-value of >1.65 in the biological sample comprising cells, serum, blood, plasma, amniotic fluid, sputum, urine, bodily fluids, bodily secretions, bodily excretions, or fractions thereof, from individuals diagnosed with a given solid tissue cancer;
and, wherein at least 50% of the markers in a set each comprise of one or more methylated residues, and/or wherein at least 50% of the markers in a set that are present, or above a cutoff level, or present with a z-value of >1.65 comprise of one or more methylated residues, in the biological sample comprising cells, serum, blood, plasma, amniotic fluid, sputum, urine, bodily fluids, bodily secretions, bodily excretions, or fractions thereof, from at least 50% of individuals diagnosed with a given solid tissue cancer, said method comprising:
obtaining the biological sample, the biological sample including cell-free DNA, RNA, and/or protein originating from the cells or tissue and from one or more other tissues or cells, wherein the biological sample is selected from the group consisting of cells, serum, blood, plasma, amniotic fluid, sputum, urine, bodily fluids, bodily secretions, bodily excretions, or fractions thereof;
fractionating the sample into one or more fractions, wherein at least one fraction comprises exosomes, tumor-associated vesicles, other protected states, or cell-free DNA, RNA, and/or protein;
subjecting the nucleic acid molecules in one or more fractions to a treatment with one or more DNA repair enzymes and chemicals under conditions suitable to convert methylated and hydroxymethylated cytosine residues to dihydrouracil residues;
carrying out at least one enrichment step for 50% or more disease-specific and/or cell/tissue-specific DNA, RNA, and/or protein markers during either said fractionating step and/or by carrying out a nucleic acid amplification step; and
performing one or more assays to detect and distinguish the plurality of cancer-specific and/or cell/tissue-specific DNA, RNA, and/or protein markers, thereby identifying their presence or levels in the sample, wherein individuals with a given tissue-specific cancer will on average have from approximately one-quarter to about one-half or more of the markers scored as present, or are above a cutoff level in the tested marker set, wherein to monitor for recurrence, a portion or all of the markers scored as being present, or the markers scored as above a cutoff level in the tested marker set are deemed the “patient-specific marker set”, and retested on subsequent biological samples from the individual after a successful treatment, to monitor for gain of marker signal, wherein if a minimum of 3 markers reappear or rise above a cutoff level in a patient-specific marker set comprising from 12-24 markers; or if a minimum of 4 markers reappear or rise above a cutoff level in a patient-specific marker set comprising from 24-36 markers; or a minimum of 5 markers reappear or rise above a cutoff level in a patient-specific marker set comprising from 36-48 markers; or a minimum of 6 or “n”/8 markers reappear or rise above a cutoff level in a patient-specific marker set comprising 48 to “n” markers, when “n”>48 markers after the treatment protocol has been administered, then the reappearance or rise above a cutoff level in a patient-specific marker set may guide a decision to resume the cancer treatment therapy or change to a new cancer treatment therapy.

45. The method of any one of claims 35 through 44, wherein the at least one enrichment step comprises of one or more of the following steps:
capturing or separating exosomes or extracellular vesicles or markers in other protected states; capturing or separating a platelet fraction; capturing or separating circulating tumor cells; capturing or separating RNA-containing complexes; capturing or separating cfDNA-nucleosome or differentially modified cfDNA-histone complexes; capturing or separating protein targets or protein target complexes; capturing or separating auto-antibodies; capturing or separating cytokines; capturing or separating methylated or hydroxymethylated cfDNA; capturing or separating marker specific DNA, cDNA, miRNA, lncRNA, ncRNA, or mRNA, or amplified complements, by hybridization to complementary capture probes in solution, on magnetic beads, or on a microarray; amplifying miRNA markers, non-coding RNA markers (lncRNA & ncRNA markers), mRNA markers, exon markers, splice-variant markers, translocation markers, or copy number variation markers in a linear or exponential manner via a polymerase extension reaction, polymerase chain reaction, DNA repair enzyme and chemically-treated-methyl-specific polymerase chain reaction, reverse-transcription reaction, DNA repair enzyme and chemically-treated-methyl-specific ligation reaction, and/or ligation reaction, using DNA polymerase, reverse transcriptase, DNA ligase, RNA ligase, DNA repair enzyme, RNase, RNaseH2, endonuclease, restriction endonuclease, exonuclease, CRISPR, DNA glycosylase or combinations thereof; selectively amplifying one or more target regions containing mutation markers or DNA repair enzyme and chemically-treated-converted DNA methylation markers, while suppressing amplification of the target regions containing wild-type sequence or complement sequence thereof, in a linear or exponential manner via a polymerase extension reaction, polymerase chain reaction, DNA repair enzyme and chemically-treated-methyl-specific polymerase chain reaction, reverse-transcription reaction, DNA repair enzyme and chemically-treated-methyl-specific ligation reaction, and/or ligation reaction, using DNA polymerase, reverse transcriptase, DNA ligase, RNA ligase, DNA repair enzyme, RNase, RNaseH2, endonuclease, restriction endonuclease, exonuclease, CRISPR, DNA glycosylase or combinations thereof; preferentially extending, ligating, or amplifying one or more primers or probes whose 3′-OH end has been liberated in an enzyme and sequence-dependent process; using one or more blocking oligonucleotide primers comprising one or more mismatched bases at the 3′ end or comprising one or more nucleotide analogs and a blocking group at the 3′ end under conditions that interfere with polymerase extension or ligation during said reaction of target-specific primer or probes hybridized in a base-specific manner to wild-type sequence or complement sequence thereof.

46. The method of any one of claims 35 through 45, wherein the one or more assays to detect and distinguish the plurality of disease-specific and/or cell/tissue-specific DNA, RNA, or protein markers comprise one or more of the following:
a quantitative real-time PCR method (qPCR); a reverse transcriptase-polymerase chain reaction (RTPCR) method; a DNA repair enzyme and chemically-treated-qPCR method; a digital PCR method (dPCR); a DNA repair enzyme and chemically-treated-dPCR method; a ligation detection method, a ligase chain reaction, a restriction endonuclease cleavage method; a DNA or RNA nuclease cleavage method; a micro-array hybridization method; a peptide-array binding method; an antibody-array method; a Mass spectrometry method; a liquid chromatography-tandem mass spectrometry (LC-MS/MS) method; a capillary or gel electrophoresis method; a chemiluminescence method; a fluorescence method; a DNA sequencing method; a DNA repair enzyme and chemically-treated-DNA sequencing method; an RNA sequencing method; a proximity ligation method; a proximity PCR method; a method comprising immobilizing an antibody-target complex; a method comprising immobilizing an aptamer-target complex; an immunoassay method; a method comprising a Western blot assay; a method comprising an enzyme linked immunosorbent assay (ELISA); a method comprising a high-throughput microarray-based enzyme-linked immunosorbent assay (ELISA); a method comprising a high-throughput flow-cytometry-based enzyme-linked immunosorbent assay (ELISA).

47. The method of any one of claims 35 through 46, wherein the one or more cutoff levels of the one or more assays to detect and distinguish the plurality of disease-specific and/or cell/tissue-specific DNA, RNA, or protein markers comprise one or more of the following calculations, comparisons, or determinations, in the one or more marker assays comparing samples from the disease vs. normal individual:
the marker ΔCt value is >2; the marker ΔCt value is >4; the ratio of detected marker-specific signal is >1.5; the ratio of detected marker-specific signal is >3; the ratio of marker concentrations is >1.5; the ratio of marker concentrations is >3; the enumerated marker-specific signals differ by >20%; the enumerated marker-specific signals differ by >50%; the marker-specific signal from a given disease sample is >85%; >90%; >95%; >96%; >97%; or >98% of the same marker-specific signals from a set of normal samples; the marker-specific signal from a given disease sample has a z-score of >1.03; >1.28; >1.65; >1.75; >1.88; or >2.05 compared to the same marker-specific signals from a set of normal samples.

48. A two-step method of diagnosing or prognosing a disease state of cells or tissue based on identifying the presence or level of a plurality of disease-specific and/or cell/tissue-specific DNA, RNA, and/or protein markers in a biological sample of an individual, said two-step method comprising:
obtaining a biological sample, the biological sample including exosomes, tumor-associated vesicles, markers within other protected states, cell-free DNA, RNA, and/or protein originating from the potentially disease state cells or tissue and from one or more other tissues or cells, wherein the biological sample is selected from the group consisting of cells, serum, blood, plasma, amniotic fluid, sputum, urine, bodily fluids, bodily secretions, and bodily excretions, or fractions thereof;
applying a first step to the biological samples with an overall sensitivity of >80% and an overall specificity of >90% or an overall Z-score of >1.28 to identify individuals more likely to be diagnosed or prognosed with the disease state; and
applying a second step to biological samples from those individuals identified in the first step with an overall specificity of >95% or an overall Z-score of >1.65 to diagnose or prognose individuals with the disease state, wherein said applying the first step and/or said applying the second step is carried out using the method of any one of claims 35 through 46.

49. The method of any one of claims 35 through 48, wherein the disease state is a solid tissue cancer including colorectal adenocarcinoma, stomach adenocarcinoma, esophageal carcinoma, breast lobular and ductal carcinoma, uterine corpus endometrial carcinoma, ovarian serous cystadenocarcinoma, cervical squamous cell carcinoma and adenocarcinoma, uterine carcinosarcoma, lung adenocarcinoma, lung squamous cell carcinoma, head & neck squamous cell carcinoma, prostate adenocarcinoma, invasive urothelial bladder cancer, liver hepatoceullular carcinoma, pancreatic ductal adenocarcinoma, or gallbladder adenocarcinoma, wherein at least 50% of the markers in a set each comprise one or more methylated cytosine residues of a CpG sequence, or the complement of one or more methylated cytosine residues of a CpG sequence selected from the list in FIG. 44 or in FIG. 60.

50. The method of one of claims 35 through 49, wherein the disease state is a solid tissue cancer including colorectal adenocarcinoma, stomach adenocarcinoma, esophageal carcinoma, breast lobular and ductal carcinoma, uterine corpus endometrial carcinoma, ovarian serous cystadenocarcinoma, cervical squamous cell carcinoma and adenocarcinoma, uterine carcinosarcoma, lung adenocarcinoma, lung squamous cell carcinoma, head & neck squamous cell carcinoma, prostate adenocarcinoma, invasive urothelial bladder cancer, liver hepatoceullular carcinoma, pancreatic ductal adenocarcinoma, or gallbladder adenocarcinoma, wherein at least 50% of the markers in a set each comprise one or more methylated residues of one or more chromosomal sub-regions selected from the list in FIG. 45 or in FIG. 61.

51. The method of any one of claims 41 through 50, wherein the disease state is a solid tissue cancer including colorectal adenocarcinoma, stomach adenocarcinoma, esophageal carcinoma, breast lobular and ductal carcinoma, uterine corpus endometrial carcinoma, ovarian serous cystadenocarcinoma, cervical squamous cell carcinoma and adenocarcinoma, uterine carcinosarcoma, lung adenocarcinoma, lung squamous cell carcinoma, head & neck squamous cell carcinoma, prostate adenocarcinoma, invasive urothelial bladder cancer, liver hepatoceullular carcinoma, pancreatic ductal adenocarcinoma, or gallbladder adenocarcinoma, wherein the one or more markers in a set comprise one or more miRNA sequences (mir ID, Gene ID) selected from the group consisting of: hsa-mir-21, MIR21; hsa-mir-182, MIR182; hsa-mir-454, MIR454; hsa-mir-96, MIR96; hsa-mir-183, MIR183; hsa-mir-549, MIR549; hsa-mir-301a, MIR301A; hsa-mir-548f-1, MIR548F1; hsa-mir-301b, MIR301B; hsa-mir-103-1, MIR1031; hsa-mir-18a, MIR18A; hsa-mir-147b, MIR147B; hsa-mir-4326, MIR4326; and hsa-mir-573, MIR573 or one or more lncRNA or ncRNA sequences selected from the list in FIG. 41.

52. The method of any one of claims 41 through 50, wherein the disease state is a solid tissue cancer including colorectal adenocarcinoma, stomach adenocarcinoma, esophageal carcinoma, breast lobular and ductal carcinoma, uterine corpus endometrial carcinoma, ovarian serous cystadenocarcinoma, cervical squamous cell carcinoma and adenocarcinoma, uterine carcinosarcoma, lung adenocarcinoma, lung squamous cell carcinoma, head & neck squamous cell carcinoma, prostate adenocarcinoma, invasive urothelial bladder cancer, liver hepatoceullular carcinoma, pancreatic ductal adenocarcinoma, or gallbladder adenocarcinoma, wherein the one or more markers in a set comprise one or more Exon RNA sequences selected from the list in FIG. 42.

53. The method of any one of claims 41 through 50, wherein the disease state is a solid tissue cancer including colorectal adenocarcinoma, stomach adenocarcinoma, esophageal carcinoma, breast lobular and ductal carcinoma, uterine corpus endometrial carcinoma, ovarian serous cystadenocarcinoma, cervical squamous cell carcinoma and adenocarcinoma, uterine carcinosarcoma, lung adenocarcinoma, lung squamous cell carcinoma, head & neck squamous cell carcinoma, prostate adenocarcinoma, invasive urothelial bladder cancer, liver hepatoceullular carcinoma, pancreatic ductal adenocarcinoma, or gallbladder adenocarcinoma, wherein the one or more markers in a set comprise one or more protein expression levels, protein product concentrations, cytokines, or autoantibody to the protein product from the group consisting of (Protein name, UniProt ID): Uncharacterized protein C19orf48, Q6RUI8; Protein FAM72B, Q86X60; Protein FAM72D, Q6L9T8; Hydroxyacylglutathione hydrolase-like protein, Q6PII5; Putative methyltransferase NSUN5, Q96P11; RNA pseudouridylate synthase domain-containing protein 1, Q9UJJ7; Collagen triple helix repeat-containing protein 1, Q96CG8; Interleukin-11. P20809; Stromelysin-2, P09238; Matrix metalloproteinase-9, P14780; Podocan-like protein 1, Q6PEZ8; Putative peptide YY-2, Q9NRI6; Osteopontin, P10451; Sulfhydryl oxidase 2, Q6ZRP7; Glypican-2, Q8N158; Macrophage migration inhibitory factor, P14174; Peptidyl-prolyl cis-trans isomerase A, P62937; and Calreticulin, and P27797.

54. The method of any one of claims 41 through 50, wherein the disease state is a solid tissue cancer including colorectal adenocarcinoma, stomach adenocarcinoma, esophageal carcinoma, breast lobular and ductal carcinoma, uterine corpus endometrial carcinoma, ovarian serous cystadenocarcinoma, cervical squamous cell carcinoma and adenocarcinoma, uterine carcinosarcoma, lung adenocarcinoma, lung squamous cell carcinoma, head & neck squamous cell carcinoma, prostate adenocarcinoma, invasive urothelial bladder cancer, liver hepatoceullular carcinoma, pancreatic ductal adenocarcinoma, or gallbladder adenocarcinoma, wherein the one or more markers in a set comprise one or more mutations, insertions, deletions, copy number changes, or expression changes in a gene selected from the group consisting of TP53 (tumor protein p53), TTN (titin), MUC16 (mucin 16), and KRAS (Ki-ras2 Kirsten rat sarcoma viral oncogene homolog).

55. The method of any one of claims 41 through 50, wherein the disease state is colon adenocarcinoma, rectal adenocarcinoma, stomach adenocarcinoma, or esophageal carcinoma, wherein at least 50% of the markers in a set each comprise one or more methylated cytosine residues of a CpG sequence, or the complement of one or more methylated cytosine residues of a CpG sequence selected from the list in FIG. 30 or in FIG. 47 or in FIG. 62.

56. The method of any one of claims 41 through 50, wherein the disease state is colon adenocarcinoma, rectal adenocarcinoma, stomach adenocarcinoma, or esophageal carcinoma, wherein at least 50% of the markers in a set each comprise one or more methylated residues of one or more chromosomal sub-regions selected from the list in FIG. 31 or in FIG. 48 or in FIG. 63.

57. The method of any one of claims 41 through 50, wherein the disease state is colon adenocarcinoma, rectal adenocarcinoma, stomach adenocarcinoma, or esophageal carcinoma, wherein the one or more markers in a set comprise one or more miRNA sequences selected from the list in FIG. 25 or (mir ID, Gene ID): hsa-mir-624, MIR624; or one or more lncRNA or ncRNA sequences selected from the list in FIG. 26 or the group consisting of [Gene ID, Coordinate (GRCh38)], ENSEMBL ID: LINC01558, chr6:167784537-167796859, and ENSG00000146521.8.

58. The method of any one of claims 41 through 50, wherein the disease state is colon adenocarcinoma, rectal adenocarcinoma, stomach adenocarcinoma, or esophageal carcinoma, wherein the one or more markers in a set comprise one or more Exon RNA sequences selected from the list in FIG. 27 or in FIG. 46.

59. The method of any one of claims 41 through 50, wherein the disease state is colon adenocarcinoma, rectal adenocarcinoma, stomach adenocarcinoma, or esophageal carcinoma, wherein the one or more markers in a set comprise one or more protein expression levels, protein product concentrations, cytokines, or autoantibody to the protein product selected from the list in FIG. 28, FIG. 29 or the group consisting of: (Gene Symbol, Chromosome Band, Gene Title, UniProt ID): SELE, 1q22-q25, selectin E, P16581; OTUD4, 4q31.21, OTU domain containing 4, Q01804; BPI, 20q11.23, bactericidal/permeability-increasing protein, P17213; ASB4, 7q21-q22, ankyrin repeat and SOCS box containing 4, Q9Y574; C6orf123, 6q27, chromosome 6 open reading frame 123, Q9Y6Z2; KPNA3, 13q14.3, karyopherin alpha 3 (importin alpha 4), and 000505; NUP98, 11p15, nucleoporin 98 kDa, P52948 or (Protein name, UniProt ID): Bactericidal permeability-increasing protein (BPI) (CAP 57), P17213.

60. The method of any one of claims 41 through 50, wherein the disease state is colon adenocarcinoma, rectal adenocarcinoma, stomach adenocarcinoma, or esophageal carcinoma, wherein the one or more markers in a set comprise one or more mutations, insertions, deletions, copy number changes, or expression changes in a gene selected from the group consisting of APC (APC regulator of WNT signaling pathway), ATM (ATM serine/threonine kinase), CSMD1 (CUB and Sushi multiple domains 1), DNAH11 (dynein axonemal heavy chain 11), DST (dystonin), EP400 (E1A binding protein p400), FAT3 (FAT atypical cadherin 3), FAT4 (FAT atypical cadherin 4), FLG (filaggrin), GLI3 (GLI family zinc finger 3), KRAS (Ki-ras2 Kirsten rat sarcoma viral oncogene homolog), LRP1B (LDL receptor related protein 1B), MUC16 (mucin 16, cell surface associated), OBSCN (obscurin, cytoskeletal calmodulin and titin-interacting RhoGEF), PCLO (piccolo presynaptic cytomatrix protein), PIK3CA (phosphatidylinositol-4,5-bisphosphate 3-kinase catalytic subunit alpha), RYR2 (ryanodine receptor 2), SYNE1 (spectrin repeat containing nuclear envelope protein 1), TP53 (tumor protein p53), TTN (titi n), and UNC13C (unc-13 homolog C).

61. The method of any one of claims 41 through 50, wherein the disease state is breast lobular and ductal carcinoma, uterine corpus endometrial carcinoma, ovarian serous cystadenocarcinoma, cervical squamous cell carcinoma and adenocarcinoma, or uterine carcinosarcoma, wherein at least 50% of the markers in a set each comprise one or more methylated cytosine residues of a CpG sequence, or the complement of one or more methylated cytosine residues of a CpG sequence selected from the list in FIG. 49 or in FIG. 64.

62. The method of any one of claims 41 through 50, wherein the disease state is breast lobular and ductal carcinoma, uterine corpus endometrial carcinoma, ovarian serous cystadenocarcinoma, cervical squamous cell carcinoma and adenocarcinoma, or uterine carcinosarcoma, wherein at least 50% of the markers in a set each comprise one or more methylated residues of one or more chromosomal sub-regions selected from the list in FIG. 50 or in FIG. 65.

63. The method of any one of claims 41 through 50, wherein the disease state is breast lobular and ductal carcinoma, uterine corpus endometrial carcinoma, ovarian serous cystadenocarcinoma, cervical squamous cell carcinoma and adenocarcinoma, or uterine carcinosarcoma, wherein the one or more markers in a set comprise of one or more miRNA sequences selected from (mir ID, Gene ID): hsa-mir-1265, MIR1265.

64. The method of any one of claims 41 through 50, wherein the disease state is breast lobular and ductal carcinoma, uterine corpus endometrial carcinoma, ovarian serous cystadenocarcinoma, cervical squamous cell carcinoma and adenocarcinoma, or uterine carcinosarcoma, wherein the one or more markers in a set comprise one or more Exon RNA sequences (Exon location, Gene) selected from the group consisting of: chr2:179209013-179209087:+, OSBPL6; chr2:179251788-179251866:+, OSBPL6; and chr2:179253736-179253880:+, OSBPL6.

65. The method of any one of claims 41 through 50, wherein the disease state is breast lobular and ductal carcinoma, uterine corpus endometrial carcinoma, ovarian serous cystadenocarcinoma, cervical squamous cell carcinoma and adenocarcinoma, or uterine carcinosarcoma, wherein the one or more markers in a set comprise one or more mRNA sequences, protein expression levels, protein product concentrations, cytokines, or autoantibody to the protein product selected from the group consisting of (Gene Symbol, Chromosome Band, Gene Title, UniProt ID): RSPO2, 8q23.1, R-spondin 2, Q6UXX9; KLC4, 6p21.1, kinesin light chain 4, Q9NSK0; and GLRX, 5q14, glutaredoxin (thioltransferase), P35754 or (Protein name, UniProt ID); R-spondin-2 (Roof plate-specific spondin-2) (hRspo2), Q6UXX9.

66. The method of any one of claims 41 through 50, wherein the disease state is breast lobular and ductal carcinoma, uterine corpus endometrial carcinoma, ovarian serous cystadenocarcinoma, cervical squamous cell carcinoma and adenocarcinoma, or uterine carcinosarcoma, wherein the one or more markers in a set comprise one or more mutations, insertions, deletions, copy number changes, or expression changes in a gene selected from the group consisting of PIK3CA (phosphatidylinositol-4,5-bisphosphate 3-kinase catalytic subunit alpha), and TTN (titin).

67. The method of any one of claims 41 through 50, wherein the disease state is lung adenocarcinoma, lung squamous cell carcinoma, or head & neck squamous cell carcinoma, wherein at least 50% of the markers in a set each comprise one or more methylated cytosine residues of a CpG sequence, or the complement of one or more methylated cytosine residues of a CpG sequence selected from the list in FIG. 51 or in FIG. 66.

68. The method of any one of claims 41 through 50, wherein the disease state is lung adenocarcinoma, lung squamous cell carcinoma, or head & neck squamous cell carcinoma, wherein at least 50% of the markers in a set each comprise one or more methylated residues of one or more chromosomal sub-regions selected from the list in FIG. 52 or in FIG. 67.

69. The method of any one of claims 41 through 50, wherein the disease state is lung adenocarcinoma, lung squamous cell carcinoma, or head & neck squamous cell carcinoma, wherein the one or more markers in a set comprise one or more miRNA sequences selected from (mir ID, Gene ID): hsa-mir-28, MIR28.

70. The method of any one of claims 41 through 50, wherein the disease state is lung adenocarcinoma, lung squamous cell carcinoma, or head & neck squamous cell carcinoma, wherein the one or more markers in a set comprise one or more Exon RNA sequences (Exon location, Gene) selected from the group consisting of: chr2: chr1:93307721-93309752:−, FAM69A; chr1:93312740-93312916:−, FAM69A; chr1:93316405-93316512:−, FAM69A; chr1:93341853-93342152:−, FAM69A; chr1:93426933-93427079:−, FAM69A; chr7:40221554-40221627:+, C7orf10; chr7:40234539-40234659:+, C7orf10;chr8:22265823-22266009:+, SLC39A14; chr8:22272293-22272415:+, SLC39A14; chr14:39509936-39510091:−, SEC23A; and chr14:39511990-39512076:−, SEC23A.

71. The method of any one of claims 41 through 50, wherein the disease state is lung adenocarcinoma, lung squamous cell carcinoma, or head & neck squamous cell carcinoma, wherein the one or more markers in a set comprise one or more mRNA sequences, protein expression levels, protein product concentrations, cytokines, or autoantibody to the protein product selected from group consisting of (Gene Symbol, Chromosome Band, Gene Title, UniProt ID): STRN3, 14q13-q21, striatin, calmodulin binding protein 3, Q13033; LRRC17, 7q22.1, leucine rich repeat containing 17, Q8N6Y2; FAM69A, 1p22, family with sequence similarity 69, member A, Q5T7M9; ATF2, 2q32, activating transcription factor 2, P15336; BHMT, 5q14.1, betaine-homocysteine S-methyltransferase, Q93088; ODZ3/TENM3, 4q34.3-q35.1, teneurin transmembrane protein 3, Q9P273; and ZFHX4, 8q21.11, zinc finger homeobox 4, Q86UP3, or (Protein name, UniProt ID): Leucine-rich repeat-containing protein 17 (p37NB), Q8N6Y2.

72. The method of any one of claims 41 through 50, wherein the disease state is lung adenocarcinoma, lung squamous cell carcinoma, or head & neck squamous cell carcinoma, wherein the one or more markers in a set comprise one or more mutations, insertions, deletions, copy number changes, or expression changes in a gene selected from the group consisting of CSMD3 (CUB and Sushi multiple domains 3), DNAH5 (dynein axonemal heavy chain 5), FAT1 (FAT atypical cadherin 1), FLG (filaggrin), KRAS (Ki-ras2 Kirsten rat sarcoma viral oncogene homolog), LRP1B (LDL receptor related protein 1B), MUC16 (mucin 16, cell surface associated), PCLO (piccolo presynaptic cytomatrix protein), PKHD1L1 (PKHD1 like 1), RELN (reelin), RYR2 (ryanodine receptor 2), SI (sucrase-isomaltase), SYNE1 (spectrin repeat containing nuclear envelope protein 1), TP53 (tumor protein p53), TTN (titin), USH2A (usherin), and XIRP2 (xin actin binding repeat containing 2).

73. The method of any one of claims 41 through 50, wherein the disease state is prostate adenocarcinoma or invasive urothelial bladder cancer, wherein at least 50% of the markers in a set each comprise one or more methylated cytosine residues of a CpG sequence, or the complement of one or more methylated cytosine residues of a CpG sequence selected from the list in FIG. 53 or in FIG. 68.

74. The method of any one of claims 41 through 50, wherein the disease state is prostate adenocarcinoma or invasive urothelial bladder cancer, wherein at least 50% of the markers in a set each comprise one or more methylated residues of one or more chromosomal sub-regions selected from the list in FIG. 54 or in FIG. 69.

75. The method of any one of claims 41 through 50, wherein the disease state is prostate adenocarcinoma or invasive urothelial bladder cancer, wherein the one or more markers in a set comprise one or more miRNA sequences (mir ID, Gene ID) selected from the group consisting of: hsa-mir-491, MIR491; and hsa-mir-1468, MIR1468 or one or more lncRNA or ncRNA sequences selected from the group consisting of [Gene ID, Coordinate (GRCh38), ENSEMBL ID]: AC007383.3, chr2:206084605-206086564, ENSG00000227946.1; and LINC00324, chr17:8220642-8224043, ENSG00000178977.3.

76. The method of any one of claims 41 through 50, wherein the disease state is prostate adenocarcinoma or invasive urothelial bladder cancer, wherein the one or more markers in a set comprise one or more Exon RNA sequences selected from (Exon location, Gene): chr21:45555942-45556055:+, C21orf33.

77. The method of any one of claims 41 through 50, wherein the disease state is prostate adenocarcinoma or invasive urothelial bladder cancer, wherein the one or more markers in a set comprise one or more mRNA sequences, protein expression levels, protein product concentrations, cytokines, or autoantibody to the protein product selected from (Gene Symbol, Chromosome Band, Gene Title, UniProt ID): PMM1, 22q13, phosphomannomutase 1, Q92871.

78. The method of any one of claims 41 through 50, wherein the disease state is prostate adenocarcinoma or invasive urothelial bladder cancer, wherein the one or more markers in a set comprise one or more mutations, insertions, deletions, copy number changes, or expression changes in a gene selected from the group consisting of BAGE2 (BAGE family member 2), DNM1P47 (dynamin 1 pseudogene 47), FRG1BP (region gene 1 family member B, pseudogene), KRAS (Ki-ras2 Kirsten rat sarcoma viral oncogene homolog), RP11-156P1.3, TTN (titin), and TUBB8P7 (tubulin beta 8 class VIII pseudogene 7).

79. The method of any one of claims 41 through 50, wherein the disease state is liver hepatoceullular carcinoma, pancreatic ductal adenocarcinoma, or gallbladder adenocarcinoma, wherein at least 50% of the markers in a set each comprise one or more methylated cytosine residues of a CpG sequence, or the complement of one or more methylated cytosine residues of a CpG sequence selected from the list in FIG. 58 or in FIG. 70.

80. The method of any one of claims 41 through 50, wherein the disease state is liver hepatoceullular carcinoma, pancreatic ductal adenocarcinoma, or gallbladder adenocarcinoma, wherein at least 50% of the markers in a set each comprise one or more methylated residues of one or more chromosomal sub-regions selected from the list in FIG. 59 or in FIG. 71.

81. The method of any one of claims 41 through 50, wherein the disease state is liver hepatoceullular carcinoma, pancreatic ductal adenocarcinoma, or gallbladder adenocarcinoma, wherein the one or more markers in a set comprise one or more miRNA sequences selected from (mir ID, Gene ID): hsa-mir-132, MIR132 or one or more lncRNA or ncRNA sequences selected from the list in FIG. 55.

82. The method of any one of claims 41 through 50, wherein the disease state is liver hepatoceullular carcinoma, pancreatic ductal adenocarcinoma, or gallbladder adenocarcinoma, wherein the one or more markers in a set comprise one or more Exon RNA sequences selected from the list in FIG. 56.

83. The method of any one of claims 41 through 50, wherein the disease state is liver hepatoceullular carcinoma, pancreatic ductal adenocarcinoma, or gallbladder adenocarcinoma, wherein the one or more markers in a set comprise one or more protein expression levels, protein product concentrations, cytokines, or autoantibody to the protein product selected from the list in FIG. 57 or from the group consisting of (Protein name, UniProt ID); Gelsolin (AGEL) (Actin-depolymerizing factor) (ADF) (Brevin), P06396; Pro-neuregulin-2, 014511; CD59 glycoprotein (1F5 antigen) (20 kDa homologous restriction factor) (HRF-20) (HRF20) (MAC-inhibitory protein) (MAC-IP) (MEM43 antigen) (Membrane attack complex inhibition factor) (MACIF) (Membrane inhibitor of reactive lysis) (MIRL) (Protectin) (CD antigen CD59), P13987; and Divergent protein kinase domain 2B (Deleted in autism-related protein 1), Q9H7Y0.

84. The method of any one of claims 41 through 50, wherein the disease state is liver hepatoceullular carcinoma, pancreatic ductal adenocarcinoma, or gallbladder adenocarcinoma, wherein the one or more markers in a set comprise one or more mutations, insertions, deletions, copy number changes, or expression changes in a gene selected from the group consisting of KRAS (Ki-ras2 Kirsten rat sarcoma viral oncogene homolog), MUC16 (mucin 16, cell surface associated), MUC4 (mucin 4, cell surface associated), TP53 (tumor protein p53), and TTN (titin).

The application's sequence listing, which the Patent Office published only in electronic form, follows.

SEQUENCE LISTING (11400 sequences)

SEQ ID NO: 1 - DNA, 37 bp, Artificial Sequence
  Description of Artificial Sequence: Synthetic primer
  Description of Combined DNA/RNA Molecule: Synthetic primer
acgacgacgacgaacccaggcaccacaagccagccag

SEQ ID NO: 2 - DNA, 37 bp, Artificial Sequence
  Description of Artificial Sequence: Synthetic primer
  Description of Combined DNA/RNA Molecule: Synthetic primer
acgacgacgacgaaagcccaggcaccacaagcgccag

SEQ ID NO: 3 - DNA, 53 bp, Artificial Sequence
  Description of Artificial Sequence: Synthetic primer
  Description of Combined DNA/RNA Molecule: Synthetic primer
acgacgacgacttgacgaacataatggatgaggtgtagaggctgtggcuggta

SEQ ID NO: 4 - DNA, 52 bp, Artificial Sequence
  Description of Artificial Sequence: Synthetic oligonucleotide
  Description of Combined DNA/RNA Molecule: Synthetic oligonucleotide
tctcataccagacgcggtaacgctccagccagagctacatgactgcauccgt

SEQ ID NO: 5 - DNA, 43 bp, Artificial Sequence
  Description of Artificial Sequence: Synthetic oligonucleotide
tccacccacacctacagcctgggtgttcgtgtcgctgtgctta

SEQ ID NO: 6 - DNA, 26 bp, Artificial Sequence
  Description of Artificial Sequence: Synthetic probe
tagactgcatccacccacacctacag

SEQ ID NO: 7 - DNA, 21 bp, Artificial Sequence
  Description of Artificial Sequence: Synthetic primer
tctcataccagacgcggtaac

SEQ ID NO: 8 - DNA, 19 bp, Artificial Sequence
  Description of Artificial Sequence: Synthetic primer
taagcacagcgacacgaac

SEQ ID NO: 9 - DNA, 45 bp, Artificial Sequence
  Description of Artificial Sequence: Synthetic primer
  Description of Combined DNA/RNA Molecule: Synthetic primer
taagcacagcgacacgaacgctggtgctgaggtgcagtatgctgt

SEQ ID NO: 10 - DNA, 25 bp, Artificial Sequence
  Description of Artificial Sequence: Synthetic primer
  Description of Combined DNA/RNA Molecule: Synthetic primer
acgacgacgacttgacgaacataac

SEQ ID NO: 11 - DNA, 43 bp, Artificial Sequence
  Description of Artificial Sequence: Synthetic primer
  Description of Combined DNA/RNA Molecule: Synthetic primer
acgacgacgacgaaacaggttagagacatgaggccacaaggcc

SEQ ID NO: 12 - DNA, 43 bp, Artificial Sequence
  Description of Artificial Sequence: Synthetic primer
  Description of Combined DNA/RNA Molecule: Synthetic primer
acgacgacgacgaagggcaccacaggttagagacatgaggccg

SEQ ID NO: 13 - DNA, 54 bp, Artificial Sequence
  Description of Artificial Sequence: Synthetic primer
  Description of Combined DNA/RNA Molecule: Synthetic primer
acgacgacgacttgacgaacataatcagtgttacctcccctgctgtgaagccaa

SEQ ID NO: 14 - DNA, 45 bp, Artificial Sequence
  Description of Artificial Sequence: Synthetic oligonucleotide
  Description of Combined DNA/RNA Molecule: Synthetic oligonucleotide
ttagccgccaaacgtaccagctgtgaaggcagtgggcgcacacga

SEQ ID NO: 15 - DNA, 42 bp, Artificial Sequence
  Description of Artificial Sequence: Synthetic oligonucleotide
cacagcatgccagggccacctgtgggcaggaacacgatagta

SEQ ID NO: 16 - DNA, 20 bp, Artificial Sequence
  Description of Artificial Sequence: Synthetic probe
tagggcgcacacagcatgcc

SEQ ID NO: 17 - DNA, 19 bp, Artificial Sequence
  Description of Artificial Sequence: Synthetic primer
ttagccgccaaacgtacca

SEQ ID NO: 18 - DNA, 20 bp, Artificial Sequence
  Description of Artificial Sequence: Synthetic primer
tactatcgtgttcctgccca

SEQ ID NO: 19 - DNA, 45 bp, Artificial Sequence
  Description of Artificial Sequence: Synthetic primer
  Description of Combined DNA/RNA Molecule: Synthetic primer
tactatcgtgttcctgcccacccctgctgtgaagccaggtggcct

SEQ ID NO: 20 - DNA, 38 bp, Artificial Sequence
  Description of Artificial Sequence: Synthetic primer
  Description of Combined DNA/RNA Molecule: Synthetic primer
acgacgacgacgaacaatggccacaccaccccagggaa

SEQ ID NO: 21 - DNA, 39 bp, Artificial Sequence
  Description of Artificial Sequence: Synthetic primer
  Description of Combined DNA/RNA Molecule: Synthetic primer
acgacgacgacgaagcctcaatggccacaccaccccaga

SEQ ID NO: 22 - DNA, 54 bp, Artificial Sequence
  Description of Artificial Sequence: Synthetic primer
  Description of Combined DNA/RNA Molecule: Synthetic primer
acgacgacgacttgacgaacataatcactggcatctggtacttgtgtgaggaga

SEQ ID NO: 23 - DNA, 43 bp, Artificial Sequence
  Description of Artificial Sequence: Synthetic oligonucleotide
  Description of Combined DNA/RNA Molecule: Synthetic oligonucleotide
tctgcccttcgcttcgaacccaagctggccaccactcacacgt

SEQ ID NO: 24 - DNA, 47 bp, Artificial Sequence
  Description of Artificial Sequence: Synthetic oligonucleotide
cacacactcaccaagcccactgagctcgttgtatggtcggcatgcta

SEQ ID NO: 25 - DNA, 26 bp, Artificial Sequence
  Description of Artificial Sequence: Synthetic probe
atccactcacacacactcaccaagcc

SEQ ID NO: 26 - DNA, 19 bp, Artificial Sequence
  Description of Artificial Sequence: Synthetic primer
tctgcccttcgcttcgaac

SEQ ID NO: 27 - DNA, 20 bp, Artificial Sequence
  Description of Artificial Sequence: Synthetic primer
tagcatgccgaccatacaac

SEQ ID NO: 28 - DNA, 57 bp, Artificial Sequence
  Description of Artificial Sequence: Synthetic primer
  Description of Combined DNA/RNA Molecule: Synthetic primer
tagcatgccgaccatacaacgcatctggtacttgtgtgaggaggagctcaatgggcc

SEQ ID NO: 29 - DNA, 38 bp, Artificial Sequence
  Description of Artificial Sequence: Synthetic primer
  Description of Combined DNA/RNA Molecule: Synthetic primer
acgacgacgacgaagaagagaggtccccacccaagagt

SEQ ID NO: 30 - DNA, 40 bp, Artificial Sequence
  Description of Artificial Sequence: Synthetic primer
  Description of Combined DNA/RNA Molecule: Synthetic primer
acgacgacgacgaactcagaagagaggtccccacccaagg

SEQ ID NO: 31 - DNA, 51 bp, Artificial Sequence
  Description of Artificial Sequence: Synthetic primer
  Description of Combined DNA/RNA Molecule: Synthetic primer
acgacgacgacttgacgaacataatggactgaggtgggtgtgctcaaccct

SEQ ID NO: 32 - DNA, 43 bp, Artificial Sequence
  Description of Artificial Sequence: Synthetic oligonucleotide
  Description of Combined DNA/RNA Molecule: Synthetic oligonucleotide
ttgcaaaccacccggacaagcaccaggaccctgtctcacacca

SEQ ID NO: 33 - DNA, 43 bp, Artificial Sequence
  Description of Artificial Sequence: Synthetic oligonucleotide
cactgcctcccaagccagatgggttggtcagcatcgactccta

SEQ ID NO: 34 - DNA, 24 bp, Artificial Sequence
  Description of Artificial Sequence: Synthetic probe
tttgtctcacactgcctcccaagc

SEQ ID NO: 35 - DNA, 19 bp, Artificial Sequence
  Description of Artificial Sequence: Synthetic primer
ttgcaaaccacccggacaa

SEQ ID NO: 36 - DNA, 20 bp, Artificial Sequence
  Description of Artificial Sequence: Synthetic primer
taggagtcgatgctgaccaa

SEQ ID NO: 37 - DNA, 47 bp, Artificial Sequence
  Description of Artificial Sequence: Synthetic primer
  Description of Combined DNA/RNA Molecule: Synthetic primer
taggagtcgatgctgaccaagtgggtgtgctcaaccccatttggctc

SEQ ID NO: 38 - DNA, 39 bp, Artificial Sequence
  Description of Artificial Sequence: Synthetic primer
  Description of Combined DNA/RNA Molecule: Synthetic primer
acgacgacgacgaaggtggatggtgcaagcaccactgga

SEQ ID NO: 39 - DNA, 41 bp, Artificial Sequence
  Description of Artificial Sequence: Synthetic primer
  Description of Combined DNA/RNA Molecule: Synthetic primer
acgacgacgacgaacaagggtggatggtgcaagcaccacta

SEQ ID NO: 40 - DNA, 55 bp, Artificial Sequence
  Description of Artificial Sequence: Synthetic primer
  Description of Combined DNA/RNA Molecule: Synthetic primer
acgacgacgacttgacgaacataatctgctttgtgaggtcacctgtctaagcctt

SEQ ID NO: 41 - DNA, 53 bp, Artificial Sequence
  Description of Artificial Sequence: Synthetic oligonucleotide
  Description of Combined DNA/RNA Molecule: Synthetic oligonucleotide
tccaaacaagctgatccgtacacagctggcattctggttcttacttcauggag

SEQ ID NO: 42 - DNA, 44 bp, Artificial Sequence
  Description of Artificial Sequence: Synthetic oligonucleotide
tgggaaaatggccctgagcccaacttgtgtcggagcggttacta

SEQ ID NO: 43 - DNA, 28 bp, Artificial Sequence
  Description of Artificial Sequence: Synthetic probe
aatacttcatgggaaaatggccctgagc

SEQ ID NO: 44 - DNA, 22 bp, Artificial Sequence
  Description of Artificial Sequence: Synthetic primer
tccaaacaagctgatccgtaca

SEQ ID NO: 45 - DNA, 19 bp, Artificial Sequence
  Description of Artificial Sequence: Synthetic primer
tagtaaccgctccgacaca

SEQ ID NO: 46 - DNA, 49 bp, Artificial Sequence
  Description of Artificial Sequence: Synthetic primer
  Description of Combined DNA/RNA Molecule: Synthetic primer
tagtaaccgctccgacacacacctgtctaagcctcaagccagctgggcc

SEQ ID NO: 47 - DNA, 38 bp, Artificial Sequence
  Description of Artificial Sequence: Synthetic primer
  Description of Combined DNA/RNA Molecule: Synthetic primer
acgacgacgacgaacacccaccacacaggcacacatct

SEQ ID NO: 48 - DNA, 43 bp, Artificial Sequence
  Description of Artificial Sequence: Synthetic primer
  Description of Combined DNA/RNA Molecule: Synthetic primer
acgacgacgacgaacatccccttaggattcccacccaccacat

SEQ ID NO: 49 - DNA, 57 bp, Artificial Sequence
  Description of Artificial Sequence: Synthetic primer
  Description of Combined DNA/RNA Molecule: Synthetic primer
acgacgacgacttgacgaacataatggtacaacatgagggctcttttgctgacacta

SEQ ID NO: 50 - DNA, 45 bp, Artificial Sequence
  Description of Artificial Sequence: Synthetic oligonucleotide
  Description of Combined DNA/RNA Molecule: Synthetic oligonucleotide
tccgactttagtgcgtcacaaccactctcagaggcagtcaccaaa

SEQ ID NO: 51 - DNA, 44 bp, Artificial Sequence
  Description of Artificial Sequence: Synthetic oligonucleotide
ccaggcctgcatttcttgcagcccttgtgggtctcgctcgtata

SEQ ID NO: 52 - DNA, 24 bp, Artificial Sequence
  Description of Artificial Sequence: Synthetic probe
ttgcagtcaccaggcctgcatttc

SEQ ID NO: 53 - DNA, 21 bp, Artificial Sequence
  Description of Artificial Sequence: Synthetic primer
tccgactttagtgcgtcacaa

SEQ ID NO: 54 - DNA, 20 bp, Artificial Sequence
  Description of Artificial Sequence: Synthetic primer
tatacgagcgagacccacaa

SEQ ID NO: 55 - DNA, 50 bp, Artificial Sequence
  Description of Artificial Sequence: Synthetic primer
  Description of Combined DNA/RNA Molecule: Synthetic primer
tatacgagcgagacccacaaacatgagggctcttttgctgacattgagga

SEQ ID NO: 56 - DNA, 37 bp, Artificial Sequence
  Description of Artificial Sequence: Synthetic primer
  Description of Combined DNA/RNA Molecule: Synthetic primer
acgacgacgacgaaggcaggcaagtggctgcauctct

SEQ ID NO: 57 - DNA, 41 bp, Artificial Sequence
  Description of Artificial Sequence: Synthetic primer
  Description of Combined DNA/RNA Molecule: Synthetic primer
acgacgacgacgaagtatccatggcaggcaagtggcugcac

SEQ ID NO: 58 - DNA, 48 bp, Artificial Sequence
  Description of Artificial Sequence: Synthetic primer
  Description of Combined DNA/RNA Molecule: Synthetic primer
acgacgacgacttgacgaacataatggccctggctgctgtccagctgt

SEQ ID NO: 59 - DNA, 45 bp, Artificial Sequence
  Description of Artificial Sequence: Synthetic oligonucleotide
  Description of Combined DNA/RNA Molecule: Synthetic oligonucleotide
tcaaacaaaggcgaccacaacccaggaggcagtggcaacagcatg

SEQ ID NO: 60 - DNA, 46 bp, Artificial Sequence
  Description of Artificial Sequence: Synthetic oligonucleotide
gcacaggacacacagggcacagaggttgtcgcataggcagttcata

SEQ ID NO: 61 - DNA, 24 bp, Artificial Sequence
  Description of Artificial Sequence: Synthetic probe
aaggcaacagcacaggacacacag

SEQ ID NO: 62 - DNA, 21 bp, Artificial Sequence
  Description of Artificial Sequence: Synthetic primer
tcaaacaaaggcgaccacaac

SEQ ID NO: 63 - DNA, 22 bp, Artificial Sequence
  Description of Artificial Sequence: Synthetic primer
tatgaactgcctatgcgacaac

SEQ ID NO: 64 - DNA, 47 bp, Artificial Sequence
  Description of Artificial Sequence: Synthetic primer
  Description of Combined DNA/RNA Molecule: Synthetic primer
tatgaactgcctatgcgacaacggctgctgtccagctgctttgtgct

SEQ ID NO: 65 - DNA, 39 bp, Artificial Sequence
  Description of Artificial Sequence: Synthetic primer
  Description of Combined DNA/RNA Molecule: Synthetic primer
acgacgacgacgaagagcagagaggcacaggacaccaac

SEQ ID NO: 66 - DNA, 38 bp, Artificial Sequence
  Description of Artificial Sequence: Synthetic primer
  Description of Combined DNA/RNA Molecule: Synthetic primer
acgacgacgacgaagccagagcagagaggcacaggacg

SEQ ID NO: 67 - DNA, 51 bp, Artificial Sequence
  Description of Artificial Sequence: Synthetic primer
  Description of Combined DNA/RNA Molecule: Synthetic primer
acgacgacgacttgacgaacataatcatgtcagaggctgccttgcagggac

SEQ ID NO: 68 - DNA, 45 bp, Artificial Sequence
  Description of Artificial Sequence: Synthetic oligonucleotide
  Description of Combined DNA/RNA Molecule: Synthetic oligonucleotide
tctgccagaacaccgacacggcaacagcctctcctgttcaucctg

SEQ ID NO: 69 - DNA, 44 bp, Artificial Sequence
  Description of Artificial Sequence: Synthetic oligonucleotide
tcccagcccagacacttcttgccacgtgtgttggcgtacggtga

SEQ ID NO: 70 - DNA, 27 bp, Artificial Sequence
  Description of Artificial Sequence: Synthetic probe
aactgttcatcccagcccagacacttc

SEQ ID NO: 71 - DNA, 19 bp, Artificial Sequence
  Description of Artificial Sequence: Synthetic primer
tctgccagaacaccgacac

SEQ ID NO: 72 - DNA, 19 bp, Artificial Sequence
  Description of Artificial Sequence: Synthetic primer
tcaccgtacgccaacacac

SEQ ID NO: 73 - DNA, 42 bp, Artificial Sequence
  Description of Artificial Sequence: Synthetic primer
  Description of Combined DNA/RNA Molecule: Synthetic primer
tcaccgtacgccaacacacgcagaggctgtgtgcaatggcag

SEQ ID NO: 74 - DNA, 47 bp, Artificial Sequence
  Description of Artificial Sequence: Synthetic primer
  Description of Combined DNA/RNA Molecule: Synthetic primer
acgacgacgacgaacagctggatgggatcatttcagacttcaaaggc

SEQ ID NO: 75 - DNA, 47 bp, Artificial Sequence
  Description of Artificial Sequence: Synthetic primer
  Description of Combined DNA/RNA Molecule: Synthetic primer
acgacgacgacgaacacacagctggatgggatcatttcagacutcag

SEQ ID NO: 76 - DNA, 49 bp, Artificial Sequence
  Description of Artificial Sequence: Synthetic primer
  Description of Combined DNA/RNA Molecule: Synthetic primer
acgacgacgacttgacgaacataatgcacccctgtcctgtgccaggcct

SEQ ID NO: 77 - DNA, 43 bp, Artificial Sequence
  Description of Artificial Sequence: Synthetic oligonucleotide
  Description of Combined DNA/RNA Molecule: Synthetic oligonucleotide
ttctagataccacggacgcacctgggctggctgctacagccgt

SEQ ID NO: 78 - DNA, 45 bp, Artificial Sequence
  Description of Artificial Sequence: Synthetic oligonucleotide
gccacagacatgctggagaggacccgtgttggtgtgcaaagctga

SEQ ID NO: 79 - DNA, 25 bp, Artificial Sequence
  Description of Artificial Sequence: Synthetic probe
aatgctacagccacagacatgctgg

SEQ ID NO: 80 - DNA, 21 bp, Artificial Sequence
  Description of Artificial Sequence: Synthetic primer
ttctagataccacggacgcac

SEQ ID NO: 81 - DNA, 20 bp, Artificial Sequence
  Description of Artificial Sequence: Synthetic primer
tcagctttgcacaccaacac

SEQ ID NO: 82 - DNA, 43 bp, Artificial Sequence
  Description of Artificial Sequence: Synthetic primer
  Description of Combined DNA/RNA Molecule: Synthetic primer
tcagctttgcacaccaacaccctgtgccaggcccacttgcaga

SEQ ID NO: 83 - DNA, 48 bp, Artificial Sequence
  Description of Artificial Sequence: Synthetic primer
  Description of Combined DNA/RNA Molecule: Synthetic primer
acgacgacgacgaacccaatgactctttgcttcttccatcacaugctg

SEQ ID NO: 84 - DNA, 46 bp, Artificial Sequence
  Description of Artificial Sequence: Synthetic primer
  Description of Combined DNA/RNA Molecule: Synthetic primer
acgacgacgacgaacctcagctcccaatgactctttgcttcutccg

SEQ ID NO: 85 - DNA, 49 bp, Artificial Sequence
  Description of Artificial Sequence: Synthetic primer
  Description of Combined DNA/RNA Molecule: Synthetic primer
acgacgacgacttgacgaacataatgccagcacctgtgggcagagggcg

SEQ ID NO: 86 - DNA, 44 bp, Artificial Sequence
  Description of Artificial Sequence: Synthetic oligonucleotide
  Description of Combined DNA/RNA Molecule: Synthetic oligonucleotide
ttcgtgggcacacaagcaagcccagaagccctgttctcagcccg

SEQ ID NO: 87 - DNA, 44 bp, Artificial Sequence
  Description of Artificial Sequence: Synthetic oligonucleotide
gcccaacacccccacctcacacttgcttggcttgatctacctga

SEQ ID NO: 88 - DNA, 23 bp, Artificial Sequence
  Description of Artificial Sequence: Synthetic probe
aagttctcagcccaacaccccca

SEQ ID NO: 89 - DNA, 19 bp, Artificial Sequence
  Description of Artificial Sequence: Synthetic primer
ttcgtgggcacacaagcaa

SEQ ID NO: 90 - DNA, 22 bp, Artificial Sequence
  Description of Artificial Sequence: Synthetic primer
tcaggtagatcaagccaagcaa

SEQ ID NO: 91 - DNA, 46 bp, Artificial Sequence
  Description of Artificial Sequence: Synthetic primer
  Description of Combined DNA/RNA Molecule: Synthetic primer
tcaggtagatcaagccaagcaacctgtgggcagagggcaatgtgaa

SEQ ID NO: 92 - DNA, 39 bp, Artificial Sequence
  Description of Artificial Sequence: Synthetic primer
  Description of Combined DNA/RNA Molecule: Synthetic primer
acgacgacgacgaaggaaggacaggcctggcacagccat

SEQ ID NO: 93 - DNA, 38 bp, Artificial Sequence
  Description of Artificial Sequence: Synthetic primer
  Description of Combined DNA/RNA Molecule: Synthetic primer
acgacgacgacgaagggcctgggaaggacaggcctggt

SEQ ID NO: 94 - DNA, 48 bp, Artificial Sequence
  Description of Artificial Sequence: Synthetic primer
  Description of Combined DNA/RNA Molecule: Synthetic primer
acgacgacgacttgacgaacataatgggctgcagctgtgtgcccctct

SEQ ID NO: 95 - DNA, 46 bp, Artificial Sequence
  Description of Artificial Sequence: Synthetic oligonucleotide
  Description of Combined DNA/RNA Molecule: Synthetic oligonucleotide
ttgaaggaggaaatcggcacagacacagggcctggagaacagggtt

SEQ ID NO: 96 - DNA, 42 bp, Artificial Sequence
  Description of Artificial Sequence: Synthetic oligonucleotide
gggccccaccacactgggagtgtcgaaccgttttaggactga

SEQ ID NO: 97 - DNA, 23 bp, Artificial Sequence
  Description of Artificial Sequence: Synthetic probe
aagagaacagggccccaccacac

SEQ ID NO: 98 - DNA, 21 bp, Artificial Sequence
  Description of Artificial Sequence: Synthetic primer
ttgaaggaggaaatcggcaca

SEQ ID NO: 99 - DNA, 22 bp, Artificial Sequence
  Description of Artificial Sequence: Synthetic primer
tcagtcctaaaacggttcgaca

SEQ ID NO: 100 - DNA, 45 bp, Artificial Sequence
  Description of Artificial Sequence: Synthetic primer
  Description of Combined DNA/RNA Molecule: Synthetic primer
tcagtcctaaaacggttcgacagtgtgcccctccccacttggcct

SEQ ID NO: 101 - DNA, 48 bp, Artificial Sequence
  Description of Artificial Sequence: Synthetic primer
  Description of Combined DNA/RNA Molecule: Synthetic primer
acgacgacgacgaaccaggtagctcatctcttagccatgtacacctcc

SEQ ID NO: 102 - DNA, 45 bp, Artificial Sequence
  Description of Artificial Sequence: Synthetic primer
  Description of Combined DNA/RNA Molecule: Synthetic primer
acgacgacgacgaagtcccaggtagctcatctcttagccaugtat

SEQ ID NO: 103 - DNA, 52 bp, Artificial Sequence
  Description of Artificial Sequence: Synthetic primer
  Description of Combined DNA/RNA Molecule: Synthetic primer
acgacgacgacttgacgaacataatgcctgggtggtttctgggagtaggtgg

SEQ ID NO: 104 - DNA, 44 bp, Artificial Sequence
  Description of Artificial Sequence: Synthetic oligonucleotide
  Description of Combined DNA/RNA Molecule: Synthetic oligonucleotide
ttctaggcgacacgacaacagtcactgggagcagggtcauggaa

SEQ ID NO: 105 - DNA, 41 bp, Artificial Sequence
  Description of Artificial Sequence: Synthetic oligonucleotide
tggaggctgcacatgcacactgtgtgggtactgtccgtgga

SEQ ID NO: 106 - DNA, 24 bp, Artificial Sequence
  Description of Artificial Sequence: Synthetic probe
ttagggtcatggaggctgcacatg

SEQ ID NO: 107 - DNA, 20 bp, Artificial Sequence
  Description of Artificial Sequence: Synthetic primer
ttctaggcgacacgacaaca

SEQ ID NO: 108 - DNA, 19 bp, Artificial Sequence
  Description of Artificial Sequence: Synthetic primer
tccacggacagtacccaca

SEQ ID NO: 109 - DNA, 50 bp, Artificial Sequence
  Description of Artificial Sequence: Synthetic primer
  Description of Combined DNA/RNA Molecule: Synthetic primer
tccacggacagtacccacatggtttctgggagtaggtgaggacctgcagc

SEQ ID NO: 110 - DNA, 49 bp, Artificial Sequence
  Description of Artificial Sequence: Synthetic primer
  Description of Combined DNA/RNA Molecule: Synthetic primer
acgacgacgacgaagaaagggaaaaatacatttcccatgaggcautgta

SEQ ID NO: 111 - DNA, 51 bp, Artificial Sequence
  Description of Artificial Sequence: Synthetic primer
  Description of Combined DNA/RNA Molecule: Synthetic primer
acgacgacgacgaacctgacaaagggaaagggaaaaatacatttcccatgg

SEQ ID NO: 112 - DNA, 55 bp, Artificial Sequence
  Description of Artificial Sequence: Synthetic primer
  Description of Combined DNA/RNA Molecule: Synthetic primer
acgacgacgacttgacgaacataattgatgtggctgaggagaactacaacuccta

SEQ ID NO: 113 - DNA, 50 bp, Artificial Sequence
  Description of Artificial Sequence: Synthetic oligonucleotide
  Description of Combined DNA/RNA Molecule: Synthetic oligonucleotide
tttcaggccctaaccaccactgactagaacagctggaggtgggcagcagg

SEQ ID NO: 114 - DNA, 44 bp, Artificial Sequence
  Description of Artificial Sequence: Synthetic oligonucleotide
gcagagtgccacaacaactgccaggtgggattaagggcgatgga

SEQ ID NO: 115 - DNA, 22 bp, Artificial Sequence
  Description of Artificial Sequence: Synthetic probe
ttgtgggcagcagagtgccaca

SEQ ID NO: 116 - DNA, 20 bp, Artificial Sequence
  Description of Artificial Sequence: Synthetic primer
tttcaggccctaaccaccac

SEQ ID NO: 117 - DNA, 20 bp, Artificial Sequence
  Description of Artificial Sequence: Synthetic primer
tccatcgcccttaatcccac

SEQ ID NO: 118 - DNA, 50 bp, Artificial Sequence
  Description of Artificial Sequence: Synthetic primer
  Description of Combined DNA/RNA Molecule: Synthetic primer
tccatcgcccttaatcccacgggagaactacaactcctggcagctgttgc

SEQ ID NO: 119 - DNA, 42 bp, Artificial Sequence
  Description of Artificial Sequence: Synthetic primer
  Description of Combined DNA/RNA Molecule: Synthetic primer
acgacgacgacgaaggagcctcaatgaggacacatcaggtga

SEQ ID NO: 120 - DNA, 40 bp, Artificial Sequence
  Description of Artificial Sequence: Synthetic primer
  Description of Combined DNA/RNA Molecule: Synthetic primer
acgacgacgacgaaccagacacccaggagcctcaauggga

SEQ ID NO: 121 - DNA, 49 bp, Artificial Sequence
  Description of Artificial Sequence: Synthetic primer
  Description of Combined DNA/RNA Molecule: Synthetic primer
acgacgacgacttgacgaacataatctcctgggctgtgctgtgcuggcc

SEQ ID NO: 122 - DNA, 46 bp, Artificial Sequence
  Description of Artificial Sequence: Synthetic oligonucleotide
  Description of Combined DNA/RNA Molecule: Synthetic oligonucleotide
tcgctcttcagcctcctacagacagaggcagctcctgttcagacga

SEQ ID NO: 123 - DNA, 47 bp, Artificial Sequence
  Description of Artificial Sequence: Synthetic oligonucleotide
gacagcaaaacccacaaggcccaggtgttctgggaattattgccgga

SEQ ID NO: 124 - DNA, 28 bp, Artificial Sequence
  Description of Artificial Sequence: Synthetic probe
aactgttcagacagcaaaacccacaagg

SEQ ID NO: 125 - DNA, 20 bp, Artificial Sequence
  Description of Artificial Sequence: Synthetic primer
tcgctcttcagcctcctaca

SEQ ID NO: 126 - DNA, 22 bp, Artificial Sequence
  Description of Artificial Sequence: Synthetic primer
tccggcaataattcccagaaca

SEQ ID NO: 127 - DNA, 46 bp, Artificial Sequence
  Description of Artificial Sequence: Synthetic primer
  Description of Combined DNA/RNA Molecule: Synthetic primer
tccggcaataattcccagaacactgtgctgtgctggctgttgctcc

SEQ ID NO: 128 - DNA, 45 bp, Artificial Sequence
  Description of Artificial Sequence: Synthetic primer
  Description of Combined DNA/RNA Molecule: Synthetic primer
acgacgacgacgaacagccacatgttccagagctacaacaagcaa

SEQ ID NO: 129 - DNA, 41 bp, Artificial Sequence
  Description of Artificial Sequence: Synthetic primer
  Description of Combined DNA/RNA Molecule: Synthetic primer
acgacgacgacgaacagcagccacatgttccagagcuacag

SEQ ID NO: 130 - DNA, 51 bp, Artificial Sequence
  Description of Artificial Sequence: Synthetic primer
  Description of Combined DNA/RNA Molecule: Synthetic primer
acgacgacgacttgacgaacataattgctccagctcctcctcctccuggta

SEQ ID NO: 131 - DNA, 49 bp, Artificial Sequence
  Description of Artificial Sequence: Synthetic oligonucleotide
  Description of Combined DNA/RNA Molecule: Synthetic oligonucleotide
tcactatcggcgtagtcaccatgcagctggcaatggaactgccagcatg

SEQ ID NO: 132 - DNA, 44 bp, Artificial Sequence
  Description of Artificial Sequence: Synthetic oligonucleotide
gcacaggagcaggaggagaggcagtggtgactttacccggagga

SEQ ID NO: 133 - DNA, 22 bp, Artificial Sequence
  Description of Artificial Sequence: Synthetic probe
ttactgccagcacaggagcagg

SEQ ID NO: 134 - DNA, 21 bp, Artificial Sequence
  Description of Artificial Sequence: Synthetic primer
tcactatcggcgtagtcacca

SEQ ID NO: 135 - DNA, 20 bp, Artificial Sequence
  Description of Artificial Sequence: Synthetic primer
tcctccgggtaaagtcacca

SEQ ID NO: 136 - DNA, 46 bp, Artificial Sequence
  Description of Artificial Sequence: Synthetic primer
  Description of Combined DNA/RNA Molecule: Synthetic primer
tcctccgggtaaagtcaccacctcctggtgtgtgtgctgttgcctt

SEQ ID NO: 137 - DNA, 37 bp, Artificial Sequence
  Description of Artificial Sequence: Synthetic primer
  Description of Combined DNA/RNA Molecule: Synthetic primer
acgacgacgacgaatggtgctggtggccagcagcaaa

SEQ ID NO: 138 - DNA, 38 bp, Artificial Sequence
  Description of Artificial Sequence: Synthetic primer
  Description of Combined DNA/RNA Molecule: Synthetic primer
acgacgacgacgaaggaggctggtgctggtggccagcg

SEQ ID NO: 139 - DNA, 53 bp, Artificial Sequence
  Description of Artificial Sequence: Synthetic primer
  Description of Combined DNA/RNA Molecule: Synthetic primer
acgacgacgacttgacgaacataatgtgtgctgacaatgcctgggtgactggg

SEQ ID NO: 140 - DNA, 41 bp, Artificial Sequence
  Description of Artificial Sequence: Synthetic oligonucleotide
  Description of Combined DNA/RNA Molecule: Synthetic oligonucleotide
ttcgtacctcggcacaccagctgggtgcaagggacaatgac

SEQ ID NO: 141 - DNA, 44 bp, Artificial Sequence
  Description of Artificial Sequence: Synthetic oligonucleotide
atggtggaggtgacagggtggctgtggctccgttactctgtcga

SEQ ID NO: 142 - DNA, 26 bp, Artificial Sequence
  Description of Artificial Sequence: Synthetic probe
ttagggacaatggtggaggtgacagg

SEQ ID NO: 143 - DNA, 19 bp, Artificial Sequence
  Description of Artificial Sequence: Synthetic primer
ttcgtacctcggcacacca

SEQ ID NO: 144 - DNA, 20 bp, Artificial Sequence
  Description of Artificial Sequence: Synthetic primer
tcgacagagtaacggagcca

SEQ ID NO: 145 - DNA, 45 bp, Artificial Sequence
  Description of Artificial Sequence: Synthetic primer
  Description of Combined DNA/RNA Molecule: Synthetic primer
tcgacagagtaacggagccagcctgggtgactggagctatgccaa

SEQ ID NO: 146 - DNA, 39 bp, Artificial Sequence
  Description of Artificial Sequence: Synthetic primer
  Description of Combined DNA/RNA Molecule: Synthetic primer
acgacgacgacgaaccacacccacagcagaggcagagaa

SEQ ID NO: 147 - DNA, 41 bp, Artificial Sequence
  Description of Artificial Sequence: Synthetic primer
  Description of Combined DNA/RNA Molecule: Synthetic primer
acgacgacgacgaacatccttccacccacacccacagcagg

SEQ ID NO: 148 - DNA, 59 bp, Artificial Sequence
  Description of Artificial Sequence: Synthetic primer
  Description of Combined DNA/RNA Molecule: Synthetic primer
acgacgacgacttgacgaacataatgagaaaaaggagtgccccaaatctccaaacttta

SEQ ID NO: 149 - DNA, 49 bp, Artificial Sequence
  Description of Artificial Sequence: Synthetic oligonucleotide
  Description of Combined DNA/RNA Molecule: Synthetic oligonucleotide
tagcgatagtaccgacagtcaccacagagggagaagcccacgcaccacc

SEQ ID NO: 150 - DNA, 51 bp, Artificial Sequence
  Description of Artificial Sequence: Synthetic oligonucleotide
ccattccactttcagaatctggagccccatggtgcggaaacctatcgtcga

SEQ ID NO: 151 - DNA, 30 bp, Artificial Sequence
  Description of Artificial Sequence: Synthetic probe
ttccacgcaccattccactttcagaatctg

SEQ ID NO: 152 - DNA, 22 bp, Artificial Sequence
  Description of Artificial Sequence: Synthetic primer
tagcgatagtaccgacagtcac

SEQ ID NO: 153 - DNA, 20 bp, Artificial Sequence
  Description of Artificial Sequence: Synthetic primer
tcgacgataggtttccgcac

SEQ ID NO: 154 - DNA, 50 bp, Artificial Sequence
  Description of Artificial Sequence: Synthetic primer
  Description of Combined DNA/RNA Molecule: Synthetic primer
tcgacgataggtttccgcacccccaaatctccaaactttggaggtgacac

SEQ ID NO: 155 - DNA, 38 bp, Artificial Sequence
  Description of Artificial Sequence: Synthetic primer
  Description of Combined DNA/RNA Molecule: Synthetic primer
acgacgacgacgaagatggagcaggagaggccagaatg

SEQ ID NO: 156 - DNA, 41 bp, Artificial Sequence
  Description of Artificial Sequence: Synthetic primer
  Description of Combined DNA/RNA Molecule: Synthetic primer
acgacgacgacgaacacaggcaccatggatggagcaggaga

SEQ ID NO: 157 - DNA, 56 bp, Artificial Sequence
  Description of Artificial Sequence: Synthetic primer
  Description of Combined DNA/RNA Molecule: Synthetic primer
acgacgacgacttgacgaacataatctcactctggttgtagtagctgctcagggtt

SEQ ID NO: 158 - DNA, 50 bp, Artificial Sequence
  Description of Artificial Sequence: Synthetic oligonucleotide
  Description of Combined DNA/RNA Molecule: Synthetic oligonucleotide
tccctcgtcatctcccttaccattgggaagaggagacagggatcaccaga

SEQ ID NO: 159 - DNA, 52 bp, Artificial Sequence
  Description of Artificial Sequence: Synthetic oligonucleotide
ccaaggccaaagcacagttttaccaagtgaaccggtcttggtgatggagcga

SEQ ID NO: 160 - DNA, 25 bp, Artificial Sequence
  Description of Artificial Sequence: Synthetic probe
ttgggatcaccaaggccaaagcaca

SEQ ID NO: 161 - DNA, 21 bp, Artificial Sequence
  Description of Artificial Sequence: Synthetic primer
tccctcgtcatctcccttacc

SEQ ID NO: 162 - DNA, 19 bp, Artificial Sequence
  Description of Artificial Sequence: Synthetic primer
tcgctccatcaccaagacc

SEQ ID NO: 163 - DNA, 47 bp, Artificial Sequence
  Description of Artificial Sequence: Synthetic primer
  Description of Combined DNA/RNA Molecule: Synthetic primer
tcgctccatcaccaagaccgctcagggtctgcaggttcacctggtag

SEQ ID NO: 164 - DNA, 39 bp, Artificial Sequence
  Description of Artificial Sequence: Synthetic primer
  Description of Combined DNA/RNA Molecule: Synthetic primer
acgacgacgacgaacccctcaggctccacacacagctat

SEQ ID NO: 165 - DNA, 37 bp, Artificial Sequence
  Description of Artificial Sequence: Synthetic primer
  Description of Combined DNA/RNA Molecule: Synthetic primer
acgacgacgacgaatgctcagccccctcaggcuccat

SEQ ID NO: 166 - DNA, 50 bp, Artificial Sequence
  Description of Artificial Sequence: Synthetic primer
  Description of Combined DNA/RNA Molecule: Synthetic primer
acgacgacgacttgacgaacataatctggctgctgggatgctggaugtga

SEQ ID NO: 167 - DNA, 46 bp, Artificial Sequence
  Description of Artificial Sequence: Synthetic oligonucleotide
  Description of Combined DNA/RNA Molecule: Synthetic oligonucleotide
tacgaatcacccgagagttcaacagactgggcacaccctcagcact

SEQ ID NO: 168 - DNA, 50 bp, Artificial Sequence
  Description of Artificial Sequence: Synthetic oligonucleotide
gcatcccacatctctgcacacatcccacttgtgggtgggtataggtcaga

SEQ ID NO: 169 - DNA, 26 bp, Artificial Sequence
  Description of Artificial Sequence: Synthetic probe
ttaccctcagcatcccacatctctgc

SEQ ID NO: 170 - DNA, 22 bp, Artificial Sequence
  Description of Artificial Sequence: Synthetic primer
tacgaatcacccgagagttcaa

SEQ ID NO: 171 - DNA, 22 bp, Artificial Sequence
  Description of Artificial Sequence: Synthetic primer
tctgacctatacccacccacaa

SEQ ID NO: 172 - DNA, 51 bp, Artificial Sequence
  Description of Artificial Sequence: Synthetic primer
  Description of Combined DNA/RNA Molecule: Synthetic primer
tctgacctatacccacccacaagatgctggatgtgggatgtgggatgtgta

SEQ ID NO: 173 - DNA, 45 bp, Artificial Sequence
  Description of Artificial Sequence: Synthetic primer
  Description of Combined DNA/RNA Molecule: Synthetic primer
acgacgacgacgaacatccaccttgtaaaagaccaggccaucatc

SEQ ID NO: 174 - DNA, 46 bp, Artificial Sequence
  Description of Artificial Sequence: Synthetic primer
  Description of Combined DNA/RNA Molecule: Synthetic primer
acgacgacgacgaagcactgcccatccaccttgtaaaagaccaggt

SEQ ID NO: 175 - DNA, 49 bp, Artificial Sequence
  Description of Artificial Sequence: Synthetic primer
  Description of Combined DNA/RNA Molecule: Synthetic primer
acgacgacgacttgacgaacataatccctggagctgctgtgccagacct

SEQ ID NO: 176 - DNA, 48 bp, Artificial Sequence
  Description of Artificial Sequence: Synthetic oligonucleotide
  Description of Combined DNA/RNA Molecule: Synthetic oligonucleotide
ttgattgggatcgttcgcacatgcacagcacaatggagagacacacgg

SEQ ID NO: 177 - DNA, 41 bp, Artificial Sequence
  Description of Artificial Sequence: Synthetic oligonucleotide
cacaaggcccagcaggtccccgtggctcaataacgggcaga

SEQ ID NO: 178 - DNA, 24 bp, Artificial Sequence
  Description of Artificial Sequence: Synthetic probe
ttagagacacacaaggcccagcag

SEQ ID NO: 179 - DNA, 20 bp, Artificial Sequence
  Description of Artificial Sequence: Synthetic primer
ttgattgggatcgttcgcac

SEQ ID NO: 180 - DNA, 20 bp, Artificial Sequence
  Description of Artificial Sequence: Synthetic primer
tctgcccgttattgagccac

SEQ ID NO: 181 - DNA, 46 bp, Artificial Sequence
  Description of Artificial Sequence: Synthetic primer
  Description of Combined DNA/RNA Molecule: Synthetic primer
tctgcccgttattgagccacgagctgctgtgccagacccctgcccg

SEQ ID NO: 182 - DNA, 38 bp, Artificial Sequence
  Description of Artificial Sequence: Synthetic primer
  Description of Combined DNA/RNA Molecule: Synthetic primer
acgacgacgacgaagtccagctgcaccagcccagctaa

SEQ ID NO: 183 - DNA, 39 bp, Artificial Sequence
  Description of Artificial Sequence: Synthetic primer
  Description of Combined DNA/RNA Molecule: Synthetic primer
acgacgacgacgaagccacagtccagctgcaccagcccg

SEQ ID NO: 184 - DNA, 54 bp, Artificial Sequence
  Description of Artificial Sequence: Synthetic primer
  Description of Combined DNA/RNA Molecule: Synthetic primer
acgacgacgacttgacgaacataatgtggagctgattgcccagtgcttagaggg

SEQ ID NO: 185 - DNA, 51 bp, Artificial Sequence
  Description of Artificial Sequence: Synthetic oligonucleotide
  Description of Combined DNA/RNA Molecule: Synthetic oligonucleotide
tttgcctcttgtaggtgccaagagctcagctgccatctcatagccacccgt

SEQ ID NO: 186 - DNA, 45 bp, Artificial Sequence
  Description of Artificial Sequence: Synthetic oligonucleotide
cccacacagaaggcctcatcaccctctgggcaacgcggatattca

SEQ ID NO: 187 - DNA, 24 bp, Artificial Sequence
  Description of Artificial Sequence: Synthetic probe
aaatagccacccacacagaaggcc

SEQ ID NO: 188 - DNA, 20 bp, Artificial Sequence
  Description of Artificial Sequence: Synthetic primer
tttgcctcttgtaggtgcca

SEQ ID NO: 189 - DNA, 19 bp, Artificial Sequence
  Description of Artificial Sequence: Synthetic primer
tgaatatccgcgttgccca

SEQ ID NO: 190 - DNA, 48 bp, Artificial Sequence
  Description of Artificial Sequence: Synthetic primer
  Description of Combined DNA/RNA Molecule: Synthetic primer
tgaatatccgcgttgcccagcccagtgcttagaggagggtggtgaggt

SEQ ID NO: 191 - DNA, 45 bp, Artificial Sequence
  Description of Artificial Sequence: Synthetic primer
  Description of Combined DNA/RNA Molecule: Synthetic primer
acgacgacgacgaaccacaggttagagacatgaggccacaaggtc

SEQ ID NO: 192 - DNA, 43 bp, Artificial Sequence; identical to SEQ ID NO: 12
  Description of Artificial Sequence: Synthetic primer
  Description of Combined DNA/RNA Molecule: Synthetic primer

SEQ ID NO: 193 - DNA, 54 bp, Artificial Sequence
  Description of Artificial Sequence: Synthetic primer
  Description of Combined DNA/RNA Molecule: Synthetic primer
acgacgacgacttgacgaacataatgcagtgttacctcccctgctgtgaagccg

SEQ ID NO: 194 - DNA, 48 bp, Artificial Sequence
  Description of Artificial Sequence: Synthetic oligonucleotide
  Description of Combined DNA/RNA Molecule: Synthetic oligonucleotide
tgtgcactagtccacgtgaaactgaaggcagtgggcacacgcagcaca

SEQ ID NO: 195 - DNA, 42 bp, Artificial Sequence
  Description of Artificial Sequence: Synthetic oligonucleotide
gcatgccagggccacctggcgtttccgcgatctttgcattca

SEQ ID NO: 196 - DNA, 21 bp, Artificial Sequence
  Description of Artificial Sequence: Synthetic probe
ttacacgcagcatgccagggc

SEQ ID NO: 197 - DNA, 22 bp, Artificial Sequence
  Description of Artificial Sequence: Synthetic primer
tgtgcactagtccacgtgaaac

SEQ ID NO: 198 - DNA, 22 bp, Artificial Sequence
  Description of Artificial Sequence: Synthetic primer
tgaatgcaaagatcgcggaaac

SEQ ID NO: 199 - DNA, 47 bp, Artificial Sequence
  Description of Artificial Sequence: Synthetic primer
  Description of Combined DNA/RNA Molecule: Synthetic primer
tgaatgcaaagatcgcggaaaccccctgctgtgaagccagatggcct

SEQ ID NO: 200 - DNA, 42 bp, Artificial Sequence
  Description of Artificial Sequence: Synthetic primer
  Description of Combined DNA/RNA Molecule: Synthetic primer
acgacgacgacgaaggaggcaccacaggttagagacaugaga

SEQ ID NO: 201 - DNA, 39 bp, Artificial Sequence
  Description of Artificial Sequence: Synthetic primer
  Description of Combined DNA/RNA Molecule: Synthetic primer
acgacgacgacgaaggtggaggcaccacaggttagagat

SEQ ID NO: 202 - DNA, 50 bp, Artificial Sequence
  Description of Artificial Sequence: Synthetic primer
  Description of Combined DNA/RNA Molecule: Synthetic primer
acgacgacgacttgacgaacataatcctcccctgctgtgaagccaggtga

SEQ ID NO: 203 - DNA, 44 bp, Artificial Sequence
  Description of Artificial Sequence: Synthetic oligonucleotide
  Description of Combined DNA/RNA Molecule: Synthetic oligonucleotide
ttcagcagcctggcatcacggctgagggctgtgaagacagtgaa

SEQ ID NO: 204 - DNA, 42 bp, Artificial Sequence
  Description of Artificial Sequence: Synthetic oligonucleotide
gtgggcacacacagcatgccagggtggagcgctaaggttgca

SEQ ID NO: 205 - DNA, 25 bp, Artificial Sequence
  Description of Artificial Sequence: Synthetic probe
aagaagacagtgggcacacacagca

SEQ ID NO: 206 - DNA, 19 bp, Artificial Sequence
  Description of Artificial Sequence: Synthetic primer
ttcagcagcctggcatcac

SEQ ID NO: 207 - DNA, 19 bp, Artificial Sequence
  Description of Artificial Sequence: Synthetic primer
tgcaaccttagcgctccac

SEQ ID NO: 208 - DNA, 44 bp, Artificial Sequence
  Description of Artificial Sequence: Synthetic primer
  Description of Combined DNA/RNA Molecule: Synthetic primer
tgcaaccttagcgctccacctgtgaagccaggtggccttggcac

SEQ ID NO: 209 - DNA, 45 bp, Artificial Sequence
  Description of Artificial Sequence: Synthetic primer
  Description of Combined DNA/RNA Molecule: Synthetic primer
acgacgacgacgaaaaactattttggaggaggaggcagcautaga

SEQ ID NO: 210 - DNA, 47 bp, Artificial Sequence
  Description of Artificial Sequence: Synthetic primer
  Description of Combined DNA/RNA Molecule: Synthetic primer
acgacgacgacgaatggaggttaggaaaactattttggaggagggag

SEQ ID NO: 211 - DNA, 50 bp, Artificial Sequence
  Description of Artificial Sequence: Synthetic primer
  Description of Combined DNA/RNA Molecule: Synthetic primer
acgacgacgacttgacgaacataatgtgggacagggtcctggtgcuctta

SEQ ID NO: 212 - DNA, 46 bp, Artificial Sequence
  Description of Artificial Sequence: Synthetic oligonucleotide
  Description of Combined DNA/RNA Molecule: Synthetic oligonucleotide
taccactcatcttctgcgacagcctggccacatcccaatcagttct

SEQ ID NO: 213 - DNA, 50 bp, Artificial Sequence
  Description of Artificial Sequence: Synthetic oligonucleotide
gtttcaacttcctgcagctcagaagagaggtgtgagtcgatctacccgca

SEQ ID NO: 214 - DNA, 30 bp, Artificial Sequence
  Description of Artificial Sequence: Synthetic probe
aaccaatcagtttcaacttcctgcagctca

SEQ ID NO: 215 - DNA, 21 bp, Artificial Sequence
  Description of Artificial Sequence: Synthetic primer
taccactcatcttctgcgaca

SEQ ID NO: 216 - DNA, 20 bp, Artificial Sequence
  Description of Artificial Sequence: Synthetic primer
tgcgggtagatcgactcaca

SEQ ID NO: 217 - DNA, 46 bp, Artificial Sequence
  Description of Artificial Sequence: Synthetic primer
  Description of Combined DNA/RNA Molecule: Synthetic primer
tgcgggtagatcgactcacaggacagggtcctggtgctcctgggta

SEQ ID NO: 218 - DNA, 38 bp, Artificial Sequence
  Description of Artificial Sequence: Synthetic primer
  Description of Combined DNA/RNA Molecule: Synthetic primer
acgacgacgacgaaacagccagcagtgagggcagcagt

SEQ ID NO: 219 - DNA, 39 bp, Artificial Sequence
  Description of Artificial Sequence: Synthetic primer
  Description of Combined DNA/RNA Molecule: Synthetic primer
acgacgacgacgaactgctcacccacagccagcagtgaa

SEQ ID NO: 220 - DNA, 51 bp, Artificial Sequence
  Description of Artificial Sequence: Synthetic primer
  Description of Combined DNA/RNA Molecule: Synthetic primer
acgacgacgacttgacgaacataatctggaggtggctgatggtggagggac

SEQ ID NO: 221 - DNA, 50 bp, Artificial Sequence
  Description of Artificial Sequence: Synthetic oligonucleotide
  Description of Combined DNA/RNA Molecule: Synthetic oligonucleotide
tcctagtacctacagtgggcaacatagcagtcacagccaccatcaccatg

SEQ ID NO: 222 - DNA, 44 bp, Artificial Sequence
  Description of Artificial Sequence: Synthetic oligonucleotide
ccacagccaccttgaggcagggttgaccgctgttatacgttgca

SEQ ID NO: 223 - DNA, 23 bp, Artificial Sequence
  Description of Artificial Sequence: Synthetic probe
accatcaccacagccaccttgag

SEQ ID NO: 224 - DNA, 22 bp, Artificial Sequence
  Description of Artificial Sequence: Synthetic primer
tcctagtacctacagtgggcaa

SEQ ID NO: 225 - DNA, 22 bp, Artificial Sequence
  Description of Artificial Sequence: Synthetic primer
tgcaacgtataacagcggtcaa

SEQ ID NO: 226 - DNA, 46 bp, Artificial Sequence
  Description of Artificial Sequence: Synthetic primer
  Description of Combined DNA/RNA Molecule: Synthetic primer
tgcaacgtataacagcggtcaactgatggtggagaggccttgcctt

SEQ ID NO: 227 - DNA, 44 bp, Artificial Sequence
  Description of Artificial Sequence: Synthetic primer
  Description of Combined DNA/RNA Molecule: Synthetic primer
acgacgacgacgaaggaccaacagaaaacccacacagcaccaga

SEQ ID NO: 228 - DNA, 44 bp, Artificial Sequence
  Description of Artificial Sequence: Synthetic primer
  Description of Combined DNA/RNA Molecule: Synthetic primer
acgacgacgacgaaccagcacagggaccaacagaaaacccacat

SEQ ID NO: 229 - DNA, 51 bp, Artificial Sequence
  Description of Artificial Sequence: Synthetic primer
  Description of Combined DNA/RNA Molecule: Synthetic primer
acgacgacgacttgacgaacataatccttggaaagccctgggcaaagctga

SEQ ID NO: 230 - DNA, 42 bp, Artificial Sequence
  Description of Artificial Sequence: Synthetic oligonucleotide
  Description of Combined DNA/RNA Molecule: Synthetic oligonucleotide
tagacacgagcgaggtcacccaggaggctgcccagcaccatc

SEQ ID NO: 231 - DNA, 54 bp, Artificial Sequence
  Description of Artificial Sequence: Synthetic oligonucleotide
ccactcacagactagttcctcagactgtgggacgtgcaaaattcaggctgtgca

SEQ ID NO: 232 - DNA, 28 bp, Artificial Sequence
  Description of Artificial Sequence: Synthetic probe
aacccagcaccactcacagactagttcc

SEQ ID NO: 233 - DNA, 19 bp, Artificial Sequence
  Description of Artificial Sequence: Synthetic primer
tagacacgagcgaggtcac

SEQ ID NO: 234 - DNA, 21 bp, Artificial Sequence
  Description of Artificial Sequence: Synthetic primer
tgcacagcctgaattttgcac

SEQ ID NO: 235 - DNA, 47 bp, Artificial Sequence
  Description of Artificial Sequence: Synthetic primer
  Description of Combined DNA/RNA Molecule: Synthetic primer
tgcacagcctgaattttgcactggaaagccctgggcaaagttggcat

SEQ ID NO: 236 - DNA, 39 bp, Artificial Sequence
  Description of Artificial Sequence: Synthetic primer
  Description of Combined DNA/RNA Molecule: Synthetic primer
acgacgacgacgaagcctagaggctcctccagcagctaa

SEQ ID NO: 237 - DNA, 38 bp, Artificial Sequence
  Description of Artificial Sequence: Synthetic primer
  Description of Combined DNA/RNA Molecule: Synthetic primer
acgacgacgacgaaggaggcctagaggctcctccagcg

SEQ ID NO: 238 - DNA, 52 bp, Artificial Sequence
  Description of Artificial Sequence: Synthetic primer
  Description of Combined DNA/RNA Molecule: Synthetic primer
acgacgacgacttgacgaacataatgagggcagtggtgaggaagtgccccta

SEQ ID NO: 239 - DNA, 46 bp, Artificial Sequence
  Description of Artificial Sequence: Synthetic oligonucleotide
  Description of Combined DNA/RNA Molecule: Synthetic oligonucleotide
taccctcctagctccgtacagctctgcactgcaggagcgcaggcgt

SEQ ID NO: 240 - DNA, 39 bp, Artificial Sequence
  Description of Artificial Sequence: Synthetic oligonucleotide
ggcacagcaccccagccagctgtgttgtctggtggtgca

SEQ ID NO: 241 - DNA, 20 bp, Artificial Sequence
  Description of Artificial Sequence: Synthetic probe
ttgagcgcaggcacagcacc

SEQ ID NO: 242 - DNA, 20 bp, Artificial Sequence
  Description of Artificial Sequence: Synthetic primer
taccctcctagctccgtaca

SEQ ID NO: 243 - DNA, 19 bp, Artificial Sequence
  Description of Artificial Sequence: Synthetic primer
tgcaccaccagacaacaca

SEQ ID NO: 244 - DNA, 44 bp, Artificial Sequence
  Description of Artificial Sequence: Synthetic primer
  Description of Combined DNA/RNA Molecule: Synthetic primer
tgcaccaccagacaacacaggtgaggaagtgcccctgatgggac

SEQ ID NO: 245 - DNA, 39 bp, Artificial Sequence
  Description of Artificial Sequence: Synthetic primer
  Description of Combined DNA/RNA Molecule: Synthetic primer
acgacgacgacgaaaccaagcctgaggtgcctcagatta

SEQ ID NO: 246 - DNA, 40 bp, Artificial Sequence
  Description of Artificial Sequence: Synthetic primer
  Description of Combined DNA/RNA Molecule: Synthetic primer
acgacgacgacgaagcaacaaggcaccaagcctgaggtgt

SEQ ID NO: 247 - DNA, 50 bp, Artificial Sequence
  Description of Artificial Sequence: Synthetic primer
  Description of Combined DNA/RNA Molecule: Synthetic primer
acgacgacgacttgacgaacataatgccctgggcctgagtcaggagcccg

SEQ ID NO: 248 - DNA, 47 bp, Artificial Sequence
  Description of Artificial Sequence: Synthetic oligonucleotide
  Description of Combined DNA/RNA Molecule: Synthetic oligonucleotide
tcttacgcccagggaatgtaacgagcccagaccaccacaacagaagt

SEQ ID NO: 249 - DNA, 49 bp, Artificial Sequence
  Description of Artificial Sequence: Synthetic oligonucleotide
gaaaccccagacccacagcaagactttccgttgtccggctgtggttaca

SEQ ID NO: 250 - DNA, 26 bp, Artificial Sequence
  Description of Artificial Sequence: Synthetic probe
ttcacaacagaaaccccagacccaca

SEQ ID NO: 251 - DNA, 22 bp, Artificial Sequence
  Description of Artificial Sequence: Synthetic primer
tcttacgcccagggaatgtaac

SEQ ID NO: 252 - DNA, 20 bp, Artificial Sequence
  Description of Artificial Sequence: Synthetic primer
tgtaaccacagccggacaac

SEQ ID NO: 253 - DNA, 40 bp, Artificial Sequence
  Description of Artificial Sequence: Synthetic primer
  Description of Combined DNA/RNA Molecule: Synthetic primer
tgtaaccacagccggacaacggaggccctgggcttgagtt

SEQ ID NO: 254 - DNA, 39 bp, Artificial Sequence
  Description of Artificial Sequence: Synthetic primer
  Description of Combined DNA/RNA Molecule: Synthetic primer
acgacgacgacgaacccctcaccacacaaccccaccttc

SEQ ID NO: 255 - DNA, 39 bp, Artificial Sequence
  Description of Artificial Sequence: Synthetic primer
  Description of Combined DNA/RNA Molecule: Synthetic primer
acgacgacgacgaacccccccctcaccacacaaccccat

SEQ ID NO: 256 - DNA, 52 bp, Artificial Sequence
  Description of Artificial Sequence: Synthetic primer
  Description of Combined DNA/RNA Molecule: Synthetic primer
acgacgacgacttgacgaacataatgggactgggcatggtcctgttacttcg

SEQ ID NO: 257 - DNA, 53 bp, Artificial Sequence
  Description of Artificial Sequence: Synthetic oligonucleotide
  Description of Combined DNA/RNA Molecule: Synthetic oligonucleotide
tggataaactaagtccgcccacgtgagcccagctcagactatcattcagaaga

SEQ ID NO: 258 - DNA, 45 bp, Artificial Sequence
  Description of Artificial Sequence: Synthetic oligonucleotide
gaaagcccccaaaagtcccagcccgtgactgagcgacgtctaaca

SEQ ID NO: 259 - DNA, 26 bp, Artificial Sequence
  Description of Artificial Sequence: Synthetic probe
tcattcagaaagcccccaaaagtccc

SEQ ID NO: 260 - DNA, 22 bp, Artificial Sequence
  Description of Artificial Sequence: Synthetic primer
tggataaactaagtccgcccac

SEQ ID NO: 261 - DNA, 21 bp, Artificial Sequence
  Description of Artificial Sequence: Synthetic primer
tgttagacgtcgctcagtcac

SEQ ID NO: 262 - DNA, 52 bp, Artificial Sequence
  Description of Artificial Sequence: Synthetic primer
  Description of Combined DNA/RNA Molecule: Synthetic primer
tgttagacgtcgctcagtcacactgggcatggtcctgttacttcaatgctga

SEQ ID NO: 263 - DNA, 39 bp, Artificial Sequence
  Description of Artificial Sequence: Synthetic primer
  Description of Combined DNA/RNA Molecule: Synthetic primer
acgacgacgacgaagcagaaggaccctgcacccagggag

SEQ ID NO: 264 - DNA, 45 bp, Artificial Sequence
  Description of Artificial Sequence: Synthetic primer
  Description of Combined DNA/RNA Molecule: Synthetic primer
acgacgacgacgaaccaaatacagcctcctgcagaaggaccctgt

SEQ ID NO: 265 - DNA, 51 bp, Artificial Sequence
  Description of Artificial Sequence: Synthetic primer
  Description of Combined DNA/RNA Molecule: Synthetic primer
acgacgacgacttgacgaacataatctgtggccagatgtgggtggaugtga

SEQ ID NO: 266 - DNA, 43 bp, Artificial Sequence
  Description of Artificial Sequence: Synthetic oligonucleotide
  Description of Combined DNA/RNA Molecule: Synthetic oligonucleotide
ttgcacgttgtcctgcacccttcccctctgggcactcacccct

SEQ ID NO: 267 - DNA, 42 bp, Artificial Sequence
  Description of Artificial Sequence: Synthetic oligonucleotide
ccctcctcaccatggcccagccggtagtttcccatgacggca

SEQ ID NO: 268 - DNA, 24 bp, Artificial Sequence
  Description of Artificial Sequence: Synthetic probe
aagcactcaccctcctcaccatgg

SEQ ID NO: 269 - DNA, 19 bp, Artificial Sequence
  Description of Artificial Sequence: Synthetic primer
ttgcacgttgtcctgcacc

SEQ ID NO: 270 - DNA, 20 bp, Artificial Sequence
  Description of Artificial Sequence: Synthetic primer
tgccgtcatgggaaactacc

SEQ ID NO: 271 - DNA, 47 bp, Artificial Sequence
  Description of Artificial Sequence: Synthetic primer
  Description of Combined DNA/RNA Molecule: Synthetic primer
tgccgtcatgggaaactaccgatgtgggtggatgtggaggttgggct

SEQ ID NO: 272 - DNA, 45 bp, Artificial Sequence
  Description of Artificial Sequence: Synthetic primer
  Description of Combined DNA/RNA Molecule: Synthetic primer
acgacgacgacgaactctgggaaagatgggtccctcttcauccct

SEQ ID NO: 273 - DNA, 43 bp, Artificial Sequence
  Description of Artificial Sequence: Synthetic primer
  Description of Combined DNA/RNA Molecule: Synthetic primer
acgacgacgacgaacacagcctctgggaaagatgggtccctcc

SEQ ID NO: 274 - DNA, 57 bp, Artificial Sequence
  Description of Artificial Sequence: Synthetic primer
  Description of Combined DNA/RNA Molecule: Synthetic primer
acgacgacgacttgacgaacataatcaagcctgtgggtatgtgctgcttatcactcg

SEQ ID NO: 275 - DNA, 43 bp, Artificial Sequence
  Description of Artificial Sequence: Synthetic oligonucleotide
  Description of Combined DNA/RNA Molecule: Synthetic oligonucleotide
taaccagttaccaccgccagcccctggcacatgggccacacca

SEQ ID NO: 276 - DNA, 51 bp, Artificial Sequence
  Description of Artificial Sequence: Synthetic oligonucleotide
cactgagtggtggctgcaggaatgaatgagtggaggatagattggagggca

SEQ ID NO: 277 - DNA, 22 bp, Artificial Sequence
  Description of Artificial Sequence: Synthetic probe
tttgggccacactgagtggtgg

SEQ ID NO: 278 - DNA, 19 bp, Artificial Sequence
  Description of Artificial Sequence: Synthetic primer
taaccagttaccaccgcca

SEQ ID NO: 279 - DNA, 21 bp, Artificial Sequence
  Description of Artificial Sequence: Synthetic primer
tgccctccaatctatcctcca

SEQ ID NO: 280 - DNA, 58 bp, Artificial Sequence
  Description of Artificial Sequence: Synthetic primer
  Description of Combined DNA/RNA Molecule: Synthetic primer
tgccctccaatctatcctccagggtatgtgctgcttatcactcattcattcttgcagt

SEQ ID NO: 281 - DNA, 36 bp, Artificial Sequence
  Description of Artificial Sequence: Synthetic primer
  Description of Combined DNA/RNA Molecule: Synthetic primer
acgacgacgacgaaagcaggcagggagggcagcaga

SEQ ID NO: 282 - DNA, 39 bp, Artificial Sequence
  Description of Artificial Sequence: Synthetic primer
  Description of Combined DNA/RNA Molecule: Synthetic primer
acgacgacgacgaacactcaccagcaggcagggagggcg

SEQ ID NO: 283 - DNA, 50 bp, Artificial Sequence
  Description of Artificial Sequence: Synthetic primer
  Description of Combined DNA/RNA Molecule: Synthetic primer
acgacgacgacttgacgaacataatggctgtggagcctcagtggcctgga

SEQ ID NO: 284 - DNA, 47 bp, Artificial Sequence
  Description of Artificial Sequence: Synthetic oligonucleotide
  Description of Combined DNA/RNA Molecule: Synthetic oligonucleotide
tcatcgccctcagatcttccacacagcagtggcagtgggccagcagt

SEQ ID NO: 285 - DNA, 47 bp, Artificial Sequence
  Description of Artificial Sequence: Synthetic oligonucleotide
gcaaccagcaggccaaagactggaagtggaggatagattggagggca

SEQ ID NO: 286 - DNA, 21 bp, Artificial Sequence
  Description of Artificial Sequence: Synthetic probe
tttgggccagcaaccagcagg

SEQ ID NO: 287 - DNA, 21 bp, Artificial Sequence
  Description of Artificial Sequence: Synthetic primer
tcatcgccctcagatcttcca

SEQ ID NO: 288 - DNA, 21 bp, Artificial Sequence
  Description of Artificial Sequence: Synthetic primer
tgccctccaatctatcctcca

SEQ ID NO: 289 - DNA, 48 bp, Artificial Sequence
  Description of Artificial Sequence: Synthetic primer
  Description of Combined DNA/RNA Molecule: Synthetic primer
tgccctccaatctatcctccagtggcctgggcttccagtctctggccc

SEQ ID NO: 290 - DNA, 44 bp, Artificial Sequence
  Description of Artificial Sequence: Synthetic primer
  Description of Combined DNA/RNA Molecule: Synthetic primer
acgacgacgacgaacacaaccactaagcccctcctttcaagaag

SEQ ID NO: 291 - DNA, 42 bp, Artificial Sequence
  Description of Artificial Sequence: Synthetic primer
  Description of Combined DNA/RNA Molecule: Synthetic primer
acgacgacgacgaagaccacaaccactaagcccctccuttct

SEQ ID NO: 292 - DNA, 53 bp, Artificial Sequence
  Description of Artificial Sequence: Synthetic primer
  Description of Combined DNA/RNA Molecule: Synthetic primer
acgacgacgacttgacgaacataatcctgtgctgactggctccattgcugtgt

SEQ ID NO: 293 - DNA, 43 bp, Artificial Sequence
  Description of Artificial Sequence: Synthetic oligonucleotide
  Description of Combined DNA/RNA Molecule: Synthetic oligonucleotide
tgcttacccacgatgcacctggcagggcaaagggatcagagag

SEQ ID NO: 294 - DNA, 44 bp, Artificial Sequence
  Description of Artificial Sequence: Synthetic oligonucleotide
gaggagggaccagaggagcaaggcggtcgtatgacttgctcgca

SEQ ID NO: 295 - DNA, 25 bp, Artificial Sequence
  Description of Artificial Sequence: Synthetic probe
ttgggatcagaggagggaccagagg

SEQ ID NO: 296 - DNA, 19 bp, Artificial Sequence
  Description of Artificial Sequence: Synthetic primer
tgcttacccacgatgcacc

SEQ ID NO: 297 - DNA, 20 bp, Artificial Sequence
  Description of Artificial Sequence: Synthetic primer
tgcgagcaagtcatacgacc

SEQ ID NO: 298 - DNA, 47 bp, Artificial Sequence
  Description of Artificial Sequence: Synthetic primer
  Description of Combined DNA/RNA Molecule: Synthetic primer
tgcgagcaagtcatacgaccccattgctgtgctgtgtgccctgctct

SEQ ID NO: 299 - DNA, 37 bp, Artificial Sequence
  Description of Artificial Sequence: Synthetic primer
  Description of Combined DNA/RNA Molecule: Synthetic primer
acgacgacgacgaagcccctcctgccacagcaaggag

SEQ ID NO: 300 - DNA, 37 bp, Artificial Sequence
  Description of Artificial Sequence: Synthetic primer
  Description of Combined DNA/RNA Molecule: Synthetic primer
acgacgacgacgaaactgcccaaggcccctccugccg

SEQ ID NO: 301 - DNA, 56 bp, Artificial Sequence
  Description of Artificial Sequence: Synthetic primer
  Description of Combined DNA/RNA Molecule: Synthetic primer
acgacgacgacttgacgaacataatgtggcaagtactatgctgttgggtgagtgtt

SEQ ID NO: 302 - DNA, 50 bp, Artificial Sequence
  Description of Artificial Sequence: Synthetic oligonucleotide
  Description of Combined DNA/RNA Molecule: Synthetic oligonucleotide
ttcgcctaccgcagtgaacctccataaaagccctgtcacaactcactcct

SEQ ID NO: 303 - DNA, 44 bp, Artificial Sequence
  Description of Artificial Sequence: Synthetic oligonucleotide
ctctctgcaccccatccactggctcgttgagacatgggctcgca

SEQ ID NO: 304 - DNA, 26 bp, Artificial Sequence
  Description of Artificial Sequence: Synthetic probe
accaactcactctctgcaccccatcc

SEQ ID NO: 305 - DNA, 19 bp, Artificial Sequence
  Description of Artificial Sequence: Synthetic primer
ttcgcctaccgcagtgaac

SEQ ID NO: 306 - DNA, 19 bp, Artificial Sequence
  Description of Artificial Sequence: Synthetic primer
tgcgagcccatgtctcaac

SEQ ID NO: 307 - DNA, 54 bp, Artificial Sequence
  Description of Artificial Sequence: Synthetic primer
  Description of Combined DNA/RNA Molecule: Synthetic primer
tgcgagcccatgtctcaaccaagtactatgctgttgggtgagtgtctttgagga

SEQ ID NO: 308 - DNA, 40 bp, Artificial Sequence
  Description of Artificial Sequence: Synthetic primer
  Description of Combined DNA/RNA Molecule: Synthetic primer
acgacgacgacgaaggcagcagcatccacatcccaagctt

SEQ ID NO: 309 - DNA, 40 bp, Artificial Sequence
  Description of Artificial Sequence: Synthetic primer
  Description of Combined DNA/RNA Molecule: Synthetic primer
acgacgacgacgaacaggaggcagcagcatccacauccct

SEQ ID NO: 310 - DNA, 50 bp, Artificial Sequence
  Description of Artificial Sequence: Synthetic primer
  Description of Combined DNA/RNA Molecule: Synthetic primer
acgacgacgacttgacgaacataatcccatgctggaggtggtggaactgc

SEQ ID NO: 311 - DNA, 43 bp, Artificial Sequence
  Description of Artificial Sequence: Synthetic oligonucleotide
  Description of Combined DNA/RNA Molecule: Synthetic oligonucleotide
tggatcgagacggaatgcaacccagaggccacccaacacccgt

SEQ ID NO: 312 - DNA, 46 bp, Artificial Sequence
  Description of Artificial Sequence: Synthetic oligonucleotide
cccaccacctccatcctaggtcccgtttccctgattgatacccgca

SEQ ID NO: 313 - DNA, 24 bp, Artificial Sequence
  Description of Artificial Sequence: Synthetic probe
ttcccaacacccaccacctccatc

SEQ ID NO: 314 - DNA, 21 bp, Artificial Sequence
  Description of Artificial Sequence: Synthetic primer
tggatcgagacggaatgcaac

SEQ ID NO: 315 - DNA, 22 bp, Artificial Sequence
  Description of Artificial Sequence: Synthetic primer
tgcgggtatcaatcagggaaac

SEQ ID NO: 316 - DNA, 50 bp, Artificial Sequence
  Description of Artificial Sequence: Synthetic primer
  Description of Combined DNA/RNA Molecule: Synthetic primer
tgcgggtatcaatcagggaaaccatgctggaggtggtggaactatgggaa

SEQ ID NO: 317 - DNA, 37 bp, Artificial Sequence
  Description of Artificial Sequence: Synthetic primer
  Description of Combined DNA/RNA Molecule: Synthetic primer
acgacgacgacgaaggagggcagcagggcacagcagc

SEQ ID NO: 318 - DNA, 36 bp, Artificial Sequence
  Description of Artificial Sequence: Synthetic primer
  Description of Combined DNA/RNA Molecule: Synthetic primer
acgacgacgacgaaaggcagggagggcagcagggcg

SEQ ID NO: 319 - DNA, 48 bp, Artificial Sequence
  Description of Artificial Sequence: Synthetic primer
  Description of Combined DNA/RNA Molecule: Synthetic primer
acgacgacgacttgacgaacataatggaggctgtggagcctcagtggt

SEQ ID NO: 320 - DNA, 47 bp, Artificial Sequence
  Description of Artificial Sequence: Synthetic oligonucleotide
  Description of Combined DNA/RNA Molecule: Synthetic oligonucleotide
ttgcatttcgttagcgacacagcagtgggtcagcaaccaacaggctg

SEQ ID NO: 321 - DNA, 43 bp, Artificial Sequence
  Description of Artificial Sequence: Synthetic oligonucleotide
ggccaaagactggaagcccaggctgtgagtcgatctacccgca

SEQ ID NO: 322 - DNA, 26 bp, Artificial Sequence
  Description of Artificial Sequence: Synthetic probe
ttaccaacaggccaaagactggaagc

SEQ ID NO: 323 - DNA, 21 bp, Artificial Sequence
  Description of Artificial Sequence: Synthetic primer
ttgcatttcgttagcgacaca

SEQ ID NO: 324 - DNA, 20 bp, Artificial Sequence
  Description of Artificial Sequence: Synthetic primer
tgcgggtagatcgactcaca

SEQ ID NO: 325 - DNA, 45 bp, Artificial Sequence
  Description of Artificial Sequence: Synthetic primer
  Description of Combined DNA/RNA Molecule: Synthetic primer
tgcgggtagatcgactcacactgtggagcctcagtggcttgggcc

SEQ ID NO: 326 - DNA, 36 bp, Artificial Sequence
  Description of Artificial Sequence: Synthetic primer
  Description of Combined DNA/RNA Molecule: Synthetic primer
acgacgacgacgaaccacagggcctgaggcacccat

SEQ ID NO: 327 - DNA, 39 bp, Artificial Sequence
  Description of Artificial Sequence: Synthetic primer
  Description of Combined DNA/RNA Molecule: Synthetic primer
acgacgacgacgaaccagccaagtccacagggccuggga

SEQ ID NO: 328 - DNA, 51 bp, Artificial Sequence
  Description of Artificial Sequence: Synthetic primer
  Description of Combined DNA/RNA Molecule: Synthetic primer
acgacgacgacttgacgaacataatgcctgaggtctggaaggtgcaggtga

SEQ ID NO: 329 - DNA, 43 bp, Artificial Sequence
  Description of Artificial Sequence: Synthetic oligonucleotide
  Description of Combined DNA/RNA Molecule: Synthetic oligonucleotide
ttgcaacaggctaccgaccccacccacccaagggatcacacga

SEQ ID NO: 330 - DNA, 46 bp, Artificial Sequence
  Description of Artificial Sequence: Synthetic oligonucleotide
cacagaggtgaactcccccacacccggtaggtaaggaagtcacgca

SEQ ID NO: 331 - DNA, 27 bp, Artificial Sequence
  Description of Artificial Sequence: Synthetic probe
ttgggatcacacagaggtgaactcccc

SEQ ID NO: 332 - DNA, 19 bp, Artificial Sequence
  Description of Artificial Sequence: Synthetic primer
ttgcaacaggctaccgacc

SEQ ID NO: 333 - DNA, 21 bp, Artificial Sequence
  Description of Artificial Sequence: Synthetic primer
tgcgtgacttccttacctacc

SEQ ID NO: 334 - DNA, 46 bp, Artificial Sequence
  Description of Artificial Sequence: Synthetic primer
  Description of Combined DNA/RNA Molecule: Synthetic primer
tgcgtgacttccttacctaccggaaggtgcaggtgaggtatgggag

SEQ ID NO: 335 - DNA, 42 bp, Artificial Sequence
  Description of Artificial Sequence: Synthetic primer
  Description of Combined DNA/RNA Molecule: Synthetic primer
acgacgacgacgaactgtccacttggatgtcccaccactgtt

SEQ ID NO: 336 - DNA, 46 bp, Artificial Sequence
  Description of Artificial Sequence: Synthetic primer
  Description of Combined DNA/RNA Molecule: Synthetic primer
acgacgacgacgaagcaaagcatctgtccacttggatgtcccaccg

SEQ ID NO: 337 - DNA, 51 bp, Artificial Sequence
  Description of Artificial Sequence: Synthetic primer
  Description of Combined DNA/RNA Molecule: Synthetic primer
acgacgacgacttgacgaacataatcctgggtgcttctgtagaggcugaga

SEQ ID NO: 338 - DNA, 43 bp, Artificial Sequence
  Description of Artificial Sequence: Synthetic oligonucleotide
  Description of Combined DNA/RNA Molecule: Synthetic oligonucleotide
ttggcaactctccacccaagccagtgtcccctgactcacacgg

SEQ ID NO: 339 - DNA, 54 bp, Artificial Sequence
  Description of Artificial Sequence: Synthetic oligonucleotide
cacaacacatggcacatcaaccacatcacagagttgtattgcgccaggatagca

SEQ ID NO: 340 - DNA, 29 bp, Artificial Sequence
  Description of Artificial Sequence: Synthetic probe
tttgactcacacaacacatggcacatcaa

SEQ ID NO: 341 - DNA, 19 bp, Artificial Sequence
  Description of Artificial Sequence: Synthetic primer
ttggcaactctccacccaa

SEQ ID NO: 342 - DNA, 21 bp, Artificial Sequence
  Description of Artificial Sequence: Synthetic primer
tgctatcctggcgcaatacaa

SEQ ID NO: 343 - DNA, 50 bp, Artificial Sequence
  Description of Artificial Sequence: Synthetic primer
  Description of Combined DNA/RNA Molecule: Synthetic primer
tgctatcctggcgcaatacaaagaggcagacttcctctgtgatatggtta

SEQ ID NO: 344 - DNA, 40 bp, Artificial Sequence
  Description of Artificial Sequence: Synthetic primer
  Description of Combined DNA/RNA Molecule: Synthetic primer
acgacgacgacgaagcacagagacctcaggccccacagcc

SEQ ID NO: 345 - DNA, 42 bp, Artificial Sequence
  Description of Artificial Sequence: Synthetic primer
  Description of Combined DNA/RNA Molecule: Synthetic primer
acgacgacgacgaaccaggagcaagtgcacagagaccucaga

SEQ ID NO: 346 - DNA, 50 bp, Artificial Sequence
  Description of Artificial Sequence: Synthetic primer
  Description of Combined DNA/RNA Molecule: Synthetic primer
acgacgacgacttgacgaacataatgtgtggaggatgggtgtgcautgaa

SEQ ID NO: 347 - DNA, 44 bp, Artificial Sequence
  Description of Artificial Sequence: Synthetic oligonucleotide
  Description of Combined DNA/RNA Molecule: Synthetic oligonucleotide
tcgacgaatctgctcagacaaacccaagcacagaggtcaccctt

SEQ ID NO: 348 - DNA, 41 bp, Artificial Sequence
  Description of Artificial Sequence: Synthetic oligonucleotide
ccccctccatcccagcagctggttgaagcagcgtctgagca

SEQ ID NO: 349 - DNA, 23 bp, Artificial Sequence
  Description of Artificial Sequence: Synthetic probe
ttgaggtcaccccctccatccca

SEQ ID NO: 350 - DNA, 21 bp, Artificial Sequence
  Description of Artificial Sequence: Synthetic primer
tcgacgaatctgctcagacaa

SEQ ID NO: 351 - DNA, 19 bp, Artificial Sequence
  Description of Artificial Sequence: Synthetic primer
tgctcagacgctgcttcaa

SEQ ID NO: 352 - DNA, 47 bp, Artificial Sequence
  Description of Artificial Sequence: Synthetic primer
  Description of Combined DNA/RNA Molecule: Synthetic primer
tgctcagacgctgcttcaagaggatgggtgtgcattgagtatgctct

SEQ ID NO: 353 - DNA, 44 bp, Artificial Sequence
  Description of Artificial Sequence: Synthetic primer
  Description of Combined DNA/RNA Molecule: Synthetic primer
acgacgacgacgaaaatgtgtggaatattggagggctcagctgt

SEQ ID NO: 354 - DNA, 45 bp, Artificial Sequence
  Description of Artificial Sequence: Synthetic primer
  Description of Combined DNA/RNA Molecule: Synthetic primer
acgacgacgacgaaggtcaatgtgtggaatattggagggcucagt

SEQ ID NO: 355 - DNA, 50 bp, Artificial Sequence
  Description of Artificial Sequence: Synthetic primer
  Description of Combined DNA/RNA Molecule: Synthetic primer
acgacgacgacttgacgaacataatgccagggaggcaaagcagcauggtt

SEQ ID NO: 356 - DNA, 55 bp, Artificial Sequence
  Description of Artificial Sequence: Synthetic oligonucleotide
  Description of Combined DNA/RNA Molecule: Synthetic oligonucleotide
ttgcacccgcgacataacccaaatggacaggactattaaggtaagcaacagggtg

SEQ ID NO: 357 - DNA, 46 bp, Artificial Sequence
  Description of Artificial Sequence: Synthetic oligonucleotide
gggcaacagacacaggcagcaggtggtaattcactcgaacggagca

SEQ ID NO: 358 - DNA, 25 bp, Artificial Sequence
  Description of Artificial Sequence: Synthetic probe
ccagcaacagggcaacagacacagg

SEQ ID NO: 359 - DNA, 19 bp, Artificial Sequence
  Description of Artificial Sequence: Synthetic primer
ttgcacccgcgacataacc

SEQ ID NO: 360 - DNA, 22 bp, Artificial Sequence
  Description of Artificial Sequence: Synthetic primer
tgctccgttcgagtgaattacc

SEQ ID NO: 361 - DNA, 45 bp, Artificial Sequence
  Description of Artificial Sequence: Synthetic primer
  Description of Combined DNA/RNA Molecule: Synthetic primer
tgctccgttcgagtgaattaccccctggctggtccctgttgccta

SEQ ID NO: 362 - DNA, 45 bp, Artificial Sequence
  Description of Artificial Sequence: Synthetic primer
  Description of Combined DNA/RNA Molecule: Synthetic primer
acgacgacgacgaattcacagtgcctcaagaacttgtccaggata

SEQ ID NO: 363 - DNA, 45 bp, Artificial Sequence
  Description of Artificial Sequence: Synthetic primer
  Description of Combined DNA/RNA Molecule: Synthetic primer
acgacgacgacgaagaaggctttcacagtgcctcaagaacutgtt

SEQ ID NO: 364 - DNA, 47 bp, Artificial Sequence
  Description of Artificial Sequence: Synthetic primer
  Description of Combined DNA/RNA Molecule: Synthetic primer
acgacgacgacttgacgaacataatggtgggtgtgggcagccuggta

SEQ ID NO: 365 - DNA, 51 bp, Artificial Sequence
  Description of Artificial Sequence: Synthetic oligonucleotide
  Description of Combined DNA/RNA Molecule: Synthetic oligonucleotide
ttgcagcgggtcacaacaagttgcagttgagctgctcaaattcgcagaagg

SEQ ID NO: 366 - DNA, 53 bp, Artificial Sequence
  Description of Artificial Sequence: Synthetic oligonucleotide
gaaaacagtgcacaccaggttgaggaagtactttggacagaggtatacgccca

SEQ ID NO: 367 - DNA, 28 bp, Artificial Sequence
  Description of Artificial Sequence: Synthetic probe
ttattcgcagaaaacagtgcacaccagg

SEQ ID NO: 368 - DNA, 19 bp, Artificial Sequence
  Description of Artificial Sequence: Synthetic primer
ttgcagcgggtcacaacaa

SEQ ID NO: 369 - DNA, 21 bp, Artificial Sequence
  Description of Artificial Sequence: Synthetic primer
tgggcgtatacctctgtccaa

SEQ ID NO: 370 - DNA, 45 bp, Artificial Sequence
  Description of Artificial Sequence: Synthetic primer
  Description of Combined DNA/RNA Molecule: Synthetic primer
tgggcgtatacctctgtccaatgtgggcagcctggtgggtgtgac

SEQ ID NO: 371 - DNA, 37 bp, Artificial Sequence
  Description of Artificial Sequence: Synthetic primer
  Description of Combined DNA/RNA Molecule: Synthetic primer
acgacgacgacgaaccacagcagaggcagccagaggt

SEQ ID NO: 372 - DNA, 38 bp, Artificial Sequence
  Description of Artificial Sequence: Synthetic primer
  Description of Combined DNA/RNA Molecule: Synthetic primer
acgacgacgacgaagccactgggtgccacagcagggac

SEQ ID NO: 373 - DNA, 53 bp, Artificial Sequence
  Description of Artificial Sequence: Synthetic primer
  Description of Combined DNA/RNA Molecule: Synthetic primer
acgacgacgacttgacgaacataatgggagggtggtaaggagtgtggaggtct

SEQ ID NO: 374 - DNA, 43 bp, Artificial Sequence
  Description of Artificial Sequence: Synthetic oligonucleotide
  Description of Combined DNA/RNA Molecule: Synthetic oligonucleotide
tcgtagactcgctatcgccacagggccacctccagtcaggctg

SEQ ID NO: 375 - DNA, 40 bp, Artificial Sequence
  Description of Artificial Sequence: Synthetic oligonucleotide
ggccaccccatgctcatgccctggtgagcagggatgagca

SEQ ID NO: 376 - DNA, 22 bp, Artificial Sequence
  Description of Artificial Sequence: Synthetic probe
aaccagtcaggccaccccatgc

SEQ ID NO: 377 - DNA, 20 bp, Artificial Sequence
  Description of Artificial Sequence: Synthetic primer
tcgtagactcgctatcgcca

SEQ ID NO: 378 - DNA, 19 bp, Artificial Sequence
  Description of Artificial Sequence: Synthetic primer
tgctcatccctgctcacca

SEQ ID NO: 379 - DNA, 51 bp, Artificial Sequence
  Description of Artificial Sequence: Synthetic primer
  Description of Combined DNA/RNA Molecule: Synthetic primer
tgctcatccctgctcaccaggtggtaaggagtgtggaggtccaagtgggcg

SEQ ID NO: 380 - DNA, 44 bp, Artificial Sequence
  Description of Artificial Sequence: Synthetic primer
  Description of Combined DNA/RNA Molecule: Synthetic primer
acgacgacgacgaaacaaggaggctgcatcacaaatccaaggcc

SEQ ID NO: 381 - DNA, 48 bp, Artificial Sequence
  Description of Artificial Sequence: Synthetic primer
  Description of Combined DNA/RNA Molecule: Synthetic primer
acgacgacgacgaacatctacaaacaaggaggctgcatcacaaatcct

SEQ ID NO: 382 - DNA, 51 bp, Artificial Sequence
  Description of Artificial Sequence: Synthetic primer
  Description of Combined DNA/RNA Molecule: Synthetic primer
acgacgacgacttgacgaacataatggagaggtaccaagcccctgauaggg

SEQ ID NO: 383 - DNA, 48 bp, Artificial Sequence
  Description of Artificial Sequence: Synthetic oligonucleotide
  Description of Combined DNA/RNA Molecule: Synthetic oligonucleotide
tctcaatgtcgagccgtaccgccatccaactacagaggactcaucttg

SEQ ID NO: 384 - DNA, 51 bp, Artificial Sequence
  Description of Artificial Sequence: Synthetic oligonucleotide
tctcatctattctccaagtgccccacagatgcggttcttcggctggctcaa

SEQ ID NO: 385 - DNA, 32 bp, Artificial Sequence
  Description of Artificial Sequence: Synthetic probe
aaggactcatctcatctattctccaagtgccc

SEQ ID NO: 386 - DNA, 20 bp, Artificial Sequence
  Description of Artificial Sequence: Synthetic primer
tctcaatgtcgagccgtacc

SEQ ID NO: 387 - DNA, 19 bp, Artificial Sequence
  Description of Artificial Sequence: Synthetic primer
ttgagccagccgaagaacc

SEQ ID NO: 388 - DNA, 48 bp, Artificial Sequence
  Description of Artificial Sequence: Synthetic primer
  Description of Combined DNA/RNA Molecule: Synthetic primer
ttgagccagccgaagaaccgtaccaagcccctgataggaggatggcac

SEQ ID NO: 389 - DNA, 41 bp, Artificial Sequence
  Description of Artificial Sequence: Synthetic primer
  Description of Combined DNA/RNA Molecule: Synthetic primer
acgacgacgacgaaagcatgagcacagtgagctgcagcaat

SEQ ID NO: 390 - DNA, 45 bp, Artificial Sequence
  Description of Artificial Sequence: Synthetic primer
  Description of Combined DNA/RNA Molecule: Synthetic primer
acgacgacgacgaacagagagttcagcatgagcacagtgagctgt

SEQ ID NO: 391 - DNA, 58 bp, Artificial Sequence
  Description of Artificial Sequence: Synthetic primer
  Description of Combined DNA/RNA Molecule: Synthetic primer
acgacgacgacttgacgaacataattgtggaagatgctcttctccttgttctcccacg

SEQ ID NO: 392 - DNA, 47 bp, Artificial Sequence
  Description of Artificial Sequence: Synthetic oligonucleotide
  Description of Combined DNA/RNA Molecule: Synthetic oligonucleotide
tccggcctttgacgataccgaagctccaccagtggctgaccaaccga

SEQ ID NO: 393 - DNA, 50 bp, Artificial Sequence
  Description of Artificial Sequence: Synthetic oligonucleotide
accagatcaacagcagcaagtaccccagggtaattcactcgaacggagca

SEQ ID NO: 394 - DNA, 27 bp, Artificial Sequence
  Description of Artificial Sequence: Synthetic probe
ttctgaccaaccagatcaacagcagca

SEQ ID NO: 395 - DNA, 19 bp, Artificial Sequence
  Description of Artificial Sequence: Synthetic primer
tccggcctttgacgatacc

SEQ ID NO: 396 - DNA, 22 bp, Artificial Sequence
  Description of Artificial Sequence: Synthetic primer
tgctccgttcgagtgaattacc

SEQ ID NO: 397 - DNA, 49 bp, Artificial Sequence
  Description of Artificial Sequence: Synthetic primer
  Description of Combined DNA/RNA Molecule: Synthetic primer
tgctccgttcgagtgaattaccccttgttctcccacaccagcttgggat

SEQ ID NO: 398 - DNA, 40 bp, Artificial Sequence
  Description of Artificial Sequence: Synthetic primer
  Description of Combined DNA/RNA Molecule: Synthetic primer
acgacgacgacgaaggcctcctggaaacagtgccagtgcc

SEQ ID NO: 399 - DNA, 40 bp, Artificial Sequence
  Description of Artificial Sequence: Synthetic primer
  Description of Combined DNA/RNA Molecule: Synthetic primer
acgacgacgacgaacccaccaggcctcctggaaacagtgt

SEQ ID NO: 400 - DNA, 51 bp, Artificial Sequence
  Description of Artificial Sequence: Synthetic primer
  Description of Combined DNA/RNA Molecule: Synthetic primer
acgacgacgacttgacgaacataatgctgcccccaaactttctgccugcac

SEQ ID NO: 401 - DNA, 48 bp, Artificial Sequence
  Description of Artificial Sequence: Synthetic oligonucleotide
  Description of Combined DNA/RNA Molecule: Synthetic oligonucleotide
tgaacgctcaaacacgtgaaccaaggtgtctgggagttggacaagaat

SEQ ID NO: 402 - DNA, 52 bp, Artificial Sequence
  Description of Artificial Sequence: Synthetic oligonucleotide
agagctgcagacttggaggctcttatacctccgttggcctgtaagcgttcca

SEQ ID NO: 403 - DNA, 27 bp, Artificial Sequence
  Description of Artificial Sequence: Synthetic probe
tcttggacaagagctgcagacttggag

SEQ ID NO: 404 - DNA, 21 bp, Artificial Sequence
  Description of Artificial Sequence: Synthetic primer
tgaacgctcaaacacgtgaac

SEQ ID NO: 405 - DNA, 20 bp, Artificial Sequence
  Description of Artificial Sequence: Synthetic primer
tggaacgcttacaggccaac

SEQ ID NO: 406 - DNA, 48 bp, Artificial Sequence
  Description of Artificial Sequence: Synthetic primer
  Description of Combined DNA/RNA Molecule: Synthetic primer
tggaacgcttacaggccaacgcccccaaactttctgcctgcgtggaga

SEQ ID NO: 407 - DNA, 46 bp, Artificial Sequence
  Description of Artificial Sequence: Synthetic primer
  Description of Combined DNA/RNA Molecule: Synthetic primer
acgacgacgacgaacaccagcactttggagacagctatccacacaa

SEQ ID NO: 408 - DNA, 42 bp, Artificial Sequence
  Description of Artificial Sequence: Synthetic primer
  Description of Combined DNA/RNA Molecule: Synthetic primer
acgacgacgacgaacccaccagcactttggagacagcuatct

SEQ ID NO: 409 - DNA, 52 bp, Artificial Sequence
  Description of Artificial Sequence: Synthetic primer
  Description of Combined DNA/RNA Molecule: Synthetic primer
acgacgacgacttgacgaacataatgctctgaagccagagaggctcagggat

SEQ ID NO: 410 - DNA, 46 bp, Artificial Sequence
  Description of Artificial Sequence: Synthetic oligonucleotide
  Description of Combined DNA/RNA Molecule: Synthetic oligonucleotide
tcgatggtcaatgagcttcacaagtgcaccacacagggtcagagtg

SEQ ID NO: 411 - DNA, 52 bp, Artificial Sequence
  Description of Artificial Sequence: Synthetic oligonucleotide
gagcacctattagccaccaggacctcagagtgttacgtgatctccctctcca

SEQ ID NO: 412 - DNA, 27 bp, Artificial Sequence
  Description of Artificial Sequence: Synthetic probe
ttagggtcagagcacctattagccacc

SEQ ID NO: 413 - DNA, 22 bp, Artificial Sequence
  Description of Artificial Sequence: Synthetic primer
tcgatggtcaatgagcttcaca

SEQ ID NO: 414 - DNA, 22 bp, Artificial Sequence
  Description of Artificial Sequence: Synthetic primer
tggagagggagatcacgtaaca

SEQ ID NO: 415 - DNA, 47 bp, Artificial Sequence
  Description of Artificial Sequence: Synthetic primer
  Description of Combined DNA/RNA Molecule: Synthetic primer
tggagagggagatcacgtaacaagaggtggttgaggtgctttgaggc

SEQ ID NO: 416 - DNA, 41 bp, Artificial Sequence
  Description of Artificial Sequence: Synthetic primer
  Description of Combined DNA/RNA Molecule: Synthetic primer
acgacgacgacgaaggcagggcaggataaaggcacagggtt

SEQ ID NO: 417 - DNA, 42 bp, Artificial Sequence
  Description of Artificial Sequence: Synthetic primer
  Description of Combined DNA/RNA Molecule: Synthetic primer
acgacgacgacgaacccacactgaccttcctgtgcacccagc

SEQ ID NO: 418 - DNA, 53 bp, Artificial Sequence
  Description of Artificial Sequence: Synthetic primer
  Description of Combined DNA/RNA Molecule: Synthetic primer
acgacgacgacttgacgaacataatgaaatgttgggtgacccccacacugact

SEQ ID NO: 419 - DNA, 45 bp, Artificial Sequence
  Description of Artificial Sequence: Synthetic oligonucleotide
  Description of Combined DNA/RNA Molecule: Synthetic oligonucleotide
tacacgtggatatctccgacctggctgcacagggtctacaggcga

SEQ ID NO: 420 - DNA, 51 bp, Artificial Sequence
  Description of Artificial Sequence: Synthetic oligonucleotide
ggcagctccaactctgggttcatagtttgcggtgctagtcacacagttcca

SEQ ID NO: 421 - DNA, 27 bp, Artificial Sequence
  Description of Artificial Sequence: Synthetic probe
ttgtctacaggcagctccaactctggg

SEQ ID NO: 422 - DNA, 21 bp, Artificial Sequence
  Description of Artificial Sequence: Synthetic primer
tacacgtggatatctccgacc

SEQ ID NO: 423 - DNA, 21 bp, Artificial Sequence
  Description of Artificial Sequence: Synthetic primer
tggaactgtgtgactagcacc

SEQ ID NO: 424 - DNA, 52 bp, Artificial Sequence
  Description of Artificial Sequence: Synthetic primer
  Description of Combined DNA/RNA Molecule: Synthetic primer
tggaactgtgtgactagcacccttcctgtgcacccagtgcaaactgtgaact

SEQ ID NO: 425 - DNA, 41 bp, Artificial Sequence
  Description of Artificial Sequence: Synthetic primer
  Description of Combined DNA/RNA Molecule: Synthetic primer
acgacgacgacgaaggagctggtgcaggaactcacagaact

SEQ ID NO: 426 - DNA, 42 bp, Artificial Sequence
  Description of Artificial Sequence: Synthetic primer
  Description of Combined DNA/RNA Molecule: Synthetic primer
acgacgacgacgaacctcagcacacttctcctggagcuggta

SEQ ID NO: 427 - DNA, 52 bp, Artificial Sequence
  Description of Artificial Sequence: Synthetic primer
  Description of Combined DNA/RNA Molecule: Synthetic primer
acgacgacgacttgacgaacataatggagagtgtgagtgcccctggaggtgc

SEQ ID NO: 428 - DNA, 49 bp, Artificial Sequence
  Description of Artificial Sequence: Synthetic oligonucleotide
  Description of Combined DNA/RNA Molecule: Synthetic oligonucleotide
tcacagagacttgccgatcacggaggagctctcctaggaagacacccgg

SEQ ID NO: 429 - DNA, 47 bp, Artificial Sequence
  Description of Artificial Sequence: Synthetic oligonucleotide
cccaagaagtcagggtcctccctgggtgtgtagcttagacatggcca

SEQ ID NO: 430 - DNA, 28 bp, Artificial Sequence
  Description of Artificial Sequence: Synthetic probe
ccgaagacacccaagaagtcagggtcct

SEQ ID NO: 431 - DNA, 21 bp, Artificial Sequence
  Description of Artificial Sequence: Synthetic primer
tcacagagacttgccgatcac

SEQ ID NO: 432 - DNA, 22 bp, Artificial Sequence
  Description of Artificial Sequence: Synthetic primer
tggccatgtctaagctacacac

SEQ ID NO: 433 - DNA, 47 bp, Artificial Sequence
  Description of Artificial Sequence: Synthetic primer
  Description of Combined DNA/RNA Molecule: Synthetic primer
tggccatgtctaagctacacacgtgagtgcccctggaggtatgtggt

SEQ ID NO: 434 - DNA, 39 bp, Artificial Sequence
  Description of Artificial Sequence: Synthetic primer
  Description of Combined DNA/RNA Molecule: Synthetic primer
acgacgacgacgaagccagtgccacttgctcccagccct

SEQ ID NO: 435 - DNA, 40 bp, Artificial Sequence
  Description of Artificial Sequence: Synthetic primer
  Description of Combined DNA/RNA Molecule: Synthetic primer
acgacgacgacgaactccaagccagtgccacttgcucccg

SEQ ID NO: 436 - DNA, 60 bp, Artificial Sequence
  Description of Artificial Sequence: Synthetic primer
  Description of Combined DNA/RNA Molecule: Synthetic primer
acgacgacgacttgacgaacataatgtttgtagttagtgcagcaatgtggtttgcaggaa

SEQ ID NO: 437 - DNA, 48 bp, Artificial Sequence
  Description of Artificial Sequence: Synthetic oligonucleotide
  Description of Combined DNA/RNA Molecule: Synthetic oligonucleotide
tctcgggaccacaatacgaaccccactgacagcacagcattcaagtag

SEQ ID NO: 438 - DNA, 50 bp, Artificial Sequence
  Description of Artificial Sequence: Synthetic oligonucleotide
agtgaccctgtctagcctcattctgcactcgttacgctaagctggtgcca

SEQ ID NO: 439 - DNA, 28 bp, Artificial Sequence
  Description of Artificial Sequence: Synthetic probe
ttgcattcaagtgaccctgtctagcctc

SEQ ID NO: 440 - DNA, 21 bp, Artificial Sequence
  Description of Artificial Sequence: Synthetic primer
tctcgggaccacaatacgaac

SEQ ID NO: 441 - DNA, 20 bp, Artificial Sequence
  Description of Artificial Sequence: Synthetic primer
tggcaccagcttagcgtaac

SEQ ID NO: 442 - DNA, 48 bp, Artificial Sequence
  Description of Artificial Sequence: Synthetic primer
  Description of Combined DNA/RNA Molecule: Synthetic primer
tggcaccagcttagcgtaacgcagcaatgtggtttgcaggaatgcagg

SEQ ID NO: 443 - DNA, 38 bp, Artificial Sequence
  Description of Artificial Sequence: Synthetic primer
  Description of Combined DNA/RNA Molecule: Synthetic primer
acgacgacgacgaaccagtgcaccccctccacaggcaa

SEQ ID NO: 444 - DNA, 39 bp, Artificial Sequence
  Description of Artificial Sequence: Synthetic primer
  Description of Combined DNA/RNA Molecule: Synthetic primer
acgacgacgacgaacagggagcacccagtgcaccccctt

SEQ ID NO: 445 - DNA, 54 bp, Artificial Sequence
  Description of Artificial Sequence: Synthetic primer
  Description of Combined DNA/RNA Molecule: Synthetic primer
acgacgacgacttgacgaacataatgccagctttgcactgattggttgcugtga

SEQ ID NO: 446 - DNA, 49 bp, Artificial Sequence
  Description of Artificial Sequence: Synthetic oligonucleotide
  Description of Combined DNA/RNA Molecule: Synthetic oligonucleotide
tgatgctggcaaaccctagaacgcacaagagcagcactcagtcaccatt

SEQ ID NO: 447 - DNA, 44 bp, Artificial Sequence
  Description of Artificial Sequence: Synthetic oligonucleotide
ccacctccagccaactcaggtcccgttccatcaccgttaggcca

SEQ ID NO: 448 - DNA, 24 bp, Artificial Sequence
  Description of Artificial Sequence: Synthetic probe
tttcagtcaccacctccagccaac

SEQ ID NO: 449 - DNA, 22 bp, Artificial Sequence
  Description of Artificial Sequence: Synthetic primer
tgatgctggcaaaccctagaac

SEQ ID NO: 450 - DNA, 20 bp, Artificial Sequence
  Description of Artificial Sequence: Synthetic primer
tggcctaacggtgatggaac

SEQ ID NO: 451 - DNA, 45 bp, Artificial Sequence
  Description of Artificial Sequence: Synthetic primer
  Description of Combined DNA/RNA Molecule: Synthetic primer
tggcctaacggtgatggaacggttgctgtgggagggacttgagtc

SEQ ID NO: 452 - DNA, 42 bp, Artificial Sequence
  Description of Artificial Sequence: Synthetic primer
  Description of Combined DNA/RNA Molecule: Synthetic primer
acgacgacgacgaaggacagagaagaggcacaggacacctga

SEQ ID NO: 453 - DNA, 40 bp, Artificial Sequence
  Description of Artificial Sequence: Synthetic primer
  Description of Combined DNA/RNA Molecule: Synthetic primer
acgacgacgacgaagggagccctgaggacagagaagggac

SEQ ID NO: 454 - DNA, 55 bp, Artificial Sequence
  Description of Artificial Sequence: Synthetic primer
  Description of Combined DNA/RNA Molecule: Synthetic primer
acgacgacgacttgacgaacataatcctgggaggaagaggaggagtatgaggtga

SEQ ID NO: 455 - DNA, 44 bp, Artificial Sequence
  Description of Artificial Sequence: Synthetic oligonucleotide
  Description of Combined DNA/RNA Molecule: Synthetic oligonucleotide
tccgggtatacactgtcccaaccaagccaggcagcatcaaggtc

SEQ ID NO: 456 - DNA, 46 bp, Artificial Sequence
  Description of Artificial Sequence: Synthetic oligonucleotide
aggctgcctcttcacactgcacacctggttaacagaggacaggcca

SEQ ID NO: 457 - DNA, 25 bp, Artificial Sequence
  Description of Artificial Sequence: Synthetic probe
ttagcatcaaggctgcctcttcaca

SEQ ID NO: 458 - DNA, 20 bp, Artificial Sequence
  Description of Artificial Sequence: Synthetic primer
tccgggtatacactgtccca

SEQ ID NO: 459 - DNA, 21 bp, Artificial Sequence
  Description of Artificial Sequence: Synthetic primer
tggcctgtcctctgttaacca

SEQ ID NO: 460 - DNA, 45 bp, Artificial Sequence
  Description of Artificial Sequence: Synthetic primer
  Description of Combined DNA/RNA Molecule: Synthetic primer
tggcctgtcctctgttaaccagaggtgggtgggtgggtatgcagc

SEQ ID NO: 461 - DNA, 41 bp, Artificial Sequence
  Description of Artificial Sequence: Synthetic primer
  Description of Combined DNA/RNA Molecule: Synthetic primer
acgacgacgacgaagctgccagcatgagcagttccaggaag

SEQ ID NO: 462 - DNA, 40 bp, Artificial Sequence
  Description of Artificial Sequence: Synthetic primer
  Description of Combined DNA/RNA Molecule: Synthetic primer
acgacgacgacgaacactcccagctgccagcatgagcagc

SEQ ID NO: 463 - DNA, 51 bp, Artificial Sequence
  Description of Artificial Sequence: Synthetic primer
  Description of Combined DNA/RNA Molecule: Synthetic primer
acgacgacgacttgacgaacataatctgtggagctgtgggtgagcaacccg

SEQ ID NO: 464 - DNA, 45 bp, Artificial Sequence
  Description of Artificial Sequence: Synthetic oligonucleotide
  Description of Combined DNA/RNA Molecule: Synthetic oligonucleotide
tatagtcacgcaggaccacacagcctcctcaccagcatcaccatt

SEQ ID NO: 465 - DNA, 43 bp, Artificial Sequence
  Description of Artificial Sequence: Synthetic oligonucleotide
ccaccaccaccatgcagccctctgtttgcggctgtctatgaca

SEQ ID NO: 466 - DNA, 24 bp, Artificial Sequence
  Description of Artificial Sequence: Synthetic probe
ttagcatcaccaccaccaccatgc

SEQ ID NO: 467 - DNA, 20 bp, Artificial Sequence
  Description of Artificial Sequence: Synthetic primer
tatagtcacgcaggaccaca

SEQ ID NO: 468 - DNA, 21 bp, Artificial Sequence
  Description of Artificial Sequence: Synthetic primer
tgtcatagacagccgcaaaca

SEQ ID NO: 469 - DNA, 46 bp, Artificial Sequence
  Description of Artificial Sequence: Synthetic primer
  Description of Combined DNA/RNA Molecule: Synthetic primer
tgtcatagacagccgcaaacagtggctgtggagctgtggatgagcg

SEQ ID NO: 470 - DNA, 41 bp, Artificial Sequence
  Description of Artificial Sequence: Synthetic primer
  Description of Combined DNA/RNA Molecule: Synthetic primer
acgacgacgacgaaactccctcacacacccaggacaggtgg

SEQ ID NO: 471 - DNA, 40 bp, Artificial Sequence
  Description of Artificial Sequence: Synthetic primer
  Description of Combined DNA/RNA Molecule: Synthetic primer
acgacgacgacgaagcccccaactccctcacacacccaga

SEQ ID NO: 472 - DNA, 52 bp, Artificial Sequence
  Description of Artificial Sequence: Synthetic primer
  Description of Combined DNA/RNA Molecule: Synthetic primer
acgacgacgacttgacgaacataatagggaggagaaacagcctgtgcugtga

SEQ ID NO: 473 - DNA, 48 bp, Artificial Sequence
  Description of Artificial Sequence: Synthetic oligonucleotide
  Description of Combined DNA/RNA Molecule: Synthetic oligonucleotide
tccaaacgattaggagcgtcaacccagctgccaagcatactcacaatg

SEQ ID NO: 474 - DNA, 50 bp, Artificial Sequence
  Description of Artificial Sequence: Synthetic oligonucleotide
caacacaggttcaaatcccaccagctcccttggacagaggtatacgccca

SEQ ID NO: 475 - DNA, 31 bp, Artificial Sequence
  Description of Artificial Sequence: Synthetic probe
ttatactcacaacacaggttcaaatcccacc

SEQ ID NO: 476 - DNA, 22 bp, Artificial Sequence
  Description of Artificial Sequence: Synthetic primer
tccaaacgattaggagcgtcaa

SEQ ID NO: 477 - DNA, 21 bp, Artificial Sequence
  Description of Artificial Sequence: Synthetic primer
tgggcgtatacctctgtccaa

SEQ ID NO: 478 - DNA, 49 bp, Artificial Sequence
  Description of Artificial Sequence: Synthetic primer
  Description of Combined DNA/RNA Molecule: Synthetic primer
tgggcgtatacctctgtccaaggagaaacagcctgtgctgtgatgggat

SEQ ID NO: 479 - DNA, 41 bp, Artificial Sequence
  Description of Artificial Sequence: Synthetic primer
  Description of Combined DNA/RNA Molecule: Synthetic primer
acgacgacgacgaaggcagcaggaacagcacatccactaga

SEQ ID NO: 480 - DNA, 39 bp, Artificial Sequence
  Description of Artificial Sequence: Synthetic primer
  Description of Combined DNA/RNA Molecule: Synthetic primer
acgacgacgacgaaccctgggcagcaggaacagcacatt

SEQ ID NO: 481 - DNA, 53 bp, Artificial Sequence
  Description of Artificial Sequence: Synthetic primer
  Description of Combined DNA/RNA Molecule: Synthetic primer
acgacgacgacttgacgaacataattactgctgggacttggcctcctcugtga

SEQ ID NO: 482 - DNA, 46 bp, Artificial Sequence
  Description of Artificial Sequence: Synthetic oligonucleotide
  Description of Combined DNA/RNA Molecule: Synthetic oligonucleotide
tgcgactctattcacgtccaagcaggcagggtgctcaaacagccgt

SEQ ID NO: 483 - DNA, 42 bp, Artificial Sequence
  Description of Artificial Sequence: Synthetic oligonucleotide
gccaccagcagctgcatgccattgctatttggtgtaccgcca

SEQ ID NO: 484 - DNA, 24 bp, Artificial Sequence
  Description of Artificial Sequence: Synthetic probe
tttcaaacagccaccagcagctgc

SEQ ID NO: 485 - DNA, 21 bp, Artificial Sequence
  Description of Artificial Sequence: Synthetic primer
tgcgactctattcacgtccaa

SEQ ID NO: 486 - DNA, 21 bp, Artificial Sequence
  Description of Artificial Sequence: Synthetic primer
tggcggtacaccaaatagcaa

SEQ ID NO: 487 - DNA, 49 bp, Artificial Sequence
  Description of Artificial Sequence: Synthetic primer
  Description of Combined DNA/RNA Molecule: Synthetic primer
tggcggtacaccaaatagcaagacttggcctcctctgtggctctggcac

SEQ ID NO: 488 - DNA, 39 bp, Artificial Sequence
  Description of Artificial Sequence: Synthetic primer
  Description of Combined DNA/RNA Molecule: Synthetic primer
acgacgacgacgaacacacacaggctcccccacacacct

SEQ ID NO: 489 - DNA, 40 bp, Artificial Sequence
  Description of Artificial Sequence: Synthetic primer
  Description of Combined DNA/RNA Molecule: Synthetic primer
acgacgacgacgaaacagctggcacacacaggctccacct

SEQ ID NO: 490 - DNA, 50 bp, Artificial Sequence
  Description of Artificial Sequence: Synthetic primer
  Description of Combined DNA/RNA Molecule: Synthetic primer
acgacgacgacttgacgaacataatgaggaccctgcctggtgtgtgggta

SEQ ID NO: 491 - DNA, 43 bp, Artificial Sequence
  Description of Artificial Sequence: Synthetic oligonucleotide
  Description of Combined DNA/RNA Molecule: Synthetic oligonucleotide
ttcgtgcgtcgtgtagcaaggccaaccagctcaggtcactgat

SEQ ID NO: 492 - DNA, 50 bp, Artificial Sequence
  Description of Artificial Sequence: Synthetic oligonucleotide
ctggcacagtcacacacatccacacatcacttgcccattttctgcaccca

SEQ ID NO: 493 - DNA, 25 bp, Artificial Sequence
  Description of Artificial Sequence: Synthetic probe
aacaggtcactggcacagtcacaca

SEQ ID NO: 494 - DNA, 19 bp, Artificial Sequence
  Description of Artificial Sequence: Synthetic primer
ttcgtgcgtcgtgtagcaa

SEQ ID NO: 495 - DNA, 20 bp, Artificial Sequence
  Description of Artificial Sequence: Synthetic primer
tgggtgcagaaaatgggcaa

SEQ ID NO: 496 - DNA, 45 bp, Artificial Sequence
  Description of Artificial Sequence: Synthetic primer
  Description of Combined DNA/RNA Molecule: Synthetic primer
tgggtgcagaaaatgggcaacctgcctggtgtgtgggtatgggag

SEQ ID NO: 497 - DNA, 44 bp, Artificial Sequence
  Description of Artificial Sequence: Synthetic primer
  Description of Combined DNA/RNA Molecule: Synthetic primer
acgacgacgacgaaccccacagttctcaaggacacctcagggaa

SEQ ID NO: 498 - DNA, 43 bp, Artificial Sequence
  Description of Artificial Sequence: Synthetic primer
  Description of Combined DNA/RNA Molecule: Synthetic primer
acgacgacgacgaagcacacatgccccacagttctcaaggacg

SEQ ID NO: 499 - DNA, 55 bp, Artificial Sequence
  Description of Artificial Sequence: Synthetic primer
  Description of Combined DNA/RNA Molecule: Synthetic primer
acgacgacgacttgacgaacataatgcctctgtgtgtatctgtgctctgcuctga

SEQ ID NO: 500 - DNA, 47 bp, Artificial Sequence
  Description of Artificial Sequence: Synthetic oligonucleotide
  Description of Combined DNA/RNA Molecule: Synthetic oligonucleotide
tggcgtaaggacactctgaaacgggccagtgtccaggtggcaucatt

SEQ ID NO: 501 - DNA, 49 bp, Artificial Sequence
  Description of Artificial Sequence: Synthetic oligonucleotide
tcaccacacaccccagtgataatcagccaggtttcctctgtgcggacca

SEQ ID NO: 502 - DNA, 23 bp, Artificial Sequence
  Description of Artificial Sequence: Synthetic probe
ttggtggcatcaccacacacccc

SEQ ID NO: 503 - DNA, 22 bp, Artificial Sequence
  Description of Artificial Sequence: Synthetic primer
tggcgtaaggacactctgaaac

SEQ ID NO: 504 - DNA, 19 bp, Artificial Sequence
  Description of Artificial Sequence: Synthetic primer
tggtccgcacagaggaaac

SEQ ID NO: 505 - DNA, 44 bp, Artificial Sequence
  Description of Artificial Sequence: Synthetic primer
  Description of Combined DNA/RNA Molecule: Synthetic primer
tggtccgcacagaggaaacgctctgctctggcactggttgattg

SEQ ID NO: 506 - DNA, 45 bp, Artificial Sequence
  Description of Artificial Sequence: Synthetic primer
  Description of Combined DNA/RNA Molecule: Synthetic primer
acgacgacgacgaacaccacaagaggaatgagcaggttcagggtc

SEQ ID NO: 507 - DNA, 43 bp, Artificial Sequence
  Description of Artificial Sequence: Synthetic primer
  Description of Combined DNA/RNA Molecule: Synthetic primer
acgacgacgacgaagccacaccacaagaggaatgagcaggttt

SEQ ID NO: 508 - DNA, 57 bp, Artificial Sequence
  Description of Artificial Sequence: Synthetic primer
  Description of Combined DNA/RNA Molecule: Synthetic primer
acgacgacgacttgacgaacataatgggtgagtctctgtcttttgggttcaagccta

SEQ ID NO: 509 - DNA, 50 bp, Artificial Sequence
  Description of Artificial Sequence: Synthetic oligonucleotide
  Description of Combined DNA/RNA Molecule: Synthetic oligonucleotide
tggcacatgagagtagttgaccccccaaaacccaacagcagaacauggag

SEQ ID NO: 510 - DNA, 43 bp, Artificial Sequence
  Description of Artificial Sequence: Synthetic oligonucleotide
tgggaacctgtggcccacaaggtggttcgatgccttccgtaca

SEQ ID NO: 511 - DNA, 25 bp, Artificial Sequence
  Description of Artificial Sequence: Synthetic probe
ttcagaacatgggaacctgtggccc

SEQ ID NO: 512 - DNA, 22 bp, Artificial Sequence
  Description of Artificial Sequence: Synthetic primer
tggcacatgagagtagttgacc

SEQ ID NO: 513 - DNA, 20 bp, Artificial Sequence
  Description of Artificial Sequence: Synthetic primer
tgtacggaaggcatcgaacc

SEQ ID NO: 514 - DNA, 52 bp, Artificial Sequence
  Description of Artificial Sequence: Synthetic primer
  Description of Combined DNA/RNA Molecule: Synthetic primer
tgtacggaaggcatcgaaccgtctctgtcttttgggttcaagcctatgcctc

SEQ ID NO: 515 - DNA, 43 bp, Artificial Sequence
  Description of Artificial Sequence: Synthetic primer
  Description of Combined DNA/RNA Molecule: Synthetic primer
acgacgacgacgaaagaggtggctgaaagttttgagcagtgac

SEQ ID NO: 516 - DNA, 38 bp, Artificial Sequence
  Description of Artificial Sequence: Synthetic primer
  Description of Combined DNA/RNA Molecule: Synthetic primer
acgacgacgacgaagaggcagaggtggctgaaagtttc

SEQ ID NO: 517 - DNA, 53 bp, Artificial Sequence
  Description of Artificial Sequence: Synthetic primer
  Description of Combined DNA/RNA Molecule: Synthetic primer
acgacgacgacttgacgaacataattgtggcctgctctgcagactttcuggct

SEQ ID NO: 518 - DNA, 48 bp, Artificial Sequence
  Description of Artificial Sequence: Synthetic oligonucleotide
  Description of Combined DNA/RNA Molecule: Synthetic oligonucleotide
tgccctatcgaaaaggacaacagctcctccctccagctcaacaaagtg

SEQ ID NO: 519 - DNA, 49 bp, Artificial Sequence
  Description of Artificial Sequence: Synthetic oligonucleotide
aagcagggaagaggagagaagcaggagttgtttgcggctgtctatgaca

SEQ ID NO: 520 - DNA, 31 bp, Artificial Sequence
  Description of Artificial Sequence: Synthetic probe
ttctcaacaaagcagggaagaggagagaagc

SEQ ID NO: 521 - DNA, 22 bp, Artificial Sequence
  Description of Artificial Sequence: Synthetic primer
tgccctatcgaaaaggacaaca

SEQ ID NO: 522 - DNA, 21 bp, Artificial Sequence
  Description of Artificial Sequence: Synthetic primer
tgtcatagacagccgcaaaca

SEQ ID NO: 523 - DNA, 49 bp, Artificial Sequence
  Description of Artificial Sequence: Synthetic primer
  Description of Combined DNA/RNA Molecule: Synthetic primer
tgtcatagacagccgcaaacactttctggcctgtgcagtctcttgactt

SEQ ID NO: 524 - DNA, 43 bp, Artificial Sequence
  Description of Artificial Sequence: Synthetic primer
  Description of Combined DNA/RNA Molecule: Synthetic primer
acgacgacgacgaagaaagatggcatcactgggaggcaggcat

SEQ ID NO: 525 - DNA, 46 bp, Artificial Sequence
  Description of Artificial Sequence: Synthetic primer
  Description of Combined DNA/RNA Molecule: Synthetic primer
acgacgacgacgaagctaagaccccaagaaagatggcatcactgga

SEQ ID NO: 526 - DNA, 53 bp, Artificial Sequence
  Description of Artificial Sequence: Synthetic primer
  Description of Combined DNA/RNA Molecule: Synthetic primer
acgacgacgacttgacgaacataatgctggctcagctgggatgctacagagct

SEQ ID NO: 527 - DNA, 46 bp, Artificial Sequence
  Description of Artificial Sequence: Synthetic oligonucleotide
  Description of Combined DNA/RNA Molecule: Synthetic oligonucleotide
ttcgctgcccggttaaacaccagccacactttgagtcctcagggaa

SEQ ID NO: 528 - DNA, 45 bp, Artificial Sequence
  Description of Artificial Sequence: Synthetic oligonucleotide
gggaggaggcagcatccacatggtgttatcggacctagctcgaca

SEQ ID NO: 529 - DNA, 23 bp, Artificial Sequence
  Description of Artificial Sequence: Synthetic probe
ttgtcctcagggaggaggcagca

SEQ ID NO: 530 - DNA, 19 bp, Artificial Sequence
  Description of Artificial Sequence: Synthetic primer
ttcgctgcccggttaaaca

SEQ ID NO: 531 - DNA, 22 bp, Artificial Sequence
  Description of Artificial Sequence: Synthetic primer
tgtcgagctaggtccgataaca

SEQ ID NO: 532 - DNA, 51 bp, Artificial Sequence
  Description of Artificial Sequence: Synthetic primer
  Description of Combined DNA/RNA Molecule: Synthetic primer
tgtcgagctaggtccgataacagggatgctacagagcccagaccgtgtggg

SEQ ID NO: 533 - DNA, 55 bp, Artificial Sequence
  Description of Artificial Sequence: Synthetic primer
  Description of Combined DNA/RNA Molecule: Synthetic primer
acgacgacgacgaagaaaaaaaaatagatgcagtaatcttcaagagctcaaagga

SEQ ID NO: 534 - DNA, 59 bp, Artificial Sequence
  Description of Artificial Sequence: Synthetic primer
  Description of Combined DNA/RNA Molecule: Synthetic primer
acgacgacgacgaagaaaaaaaagaaaaaaaaatagatgcagtaatcttcaagagctcg

SEQ ID NO: 535 - DNA, 58 bp, Artificial Sequence
  Description of Artificial Sequence: Synthetic primer
  Description of Combined DNA/RNA Molecule: Synthetic primer
acgacgacgacttgacgaacataatgccattctctgtgctgcttccaataaccactag

SEQ ID NO: 536 - DNA, 51 bp, Artificial Sequence
  Description of Artificial Sequence: Synthetic oligonucleotide
  Description of Combined DNA/RNA Molecule: Synthetic oligonucleotide
tctcataaacactccggccacccaagttgggccaggacaattttcaagcga

SEQ ID NO: 537 - DNA, 50 bp, Artificial Sequence
  Description of Artificial Sequence: Synthetic oligonucleotide
agcagagccctcagctcagatgctcattaggtggctcaataacgggcaga

SEQ ID NO: 538 - DNA, 28 bp, Artificial Sequence
  Description of Artificial Sequence: Synthetic probe
ttattttcaagcagagccctcagctcag

SEQ ID NO: 539 - DNA, 21 bp, Artificial Sequence
  Description of Artificial Sequence: Synthetic primer
tctcataaacactccggccac

SEQ ID NO: 540 - DNA, 20 bp, Artificial Sequence
  Description of Artificial Sequence: Synthetic primer
tctgcccgttattgagccac

SEQ ID NO: 541 - DNA, 56 bp, Artificial Sequence
  Description of Artificial Sequence: Synthetic primer
  Description of Combined DNA/RNA Molecule: Synthetic primer
tctgcccgttattgagccacgctgcttccaataaccactaacatccctagtgagcg

SEQ ID NO: 542 - DNA, 41 bp, Artificial Sequence
  Description of Artificial Sequence: Synthetic primer
  Description of Combined DNA/RNA Molecule: Synthetic primer
acgacgacgacgaagaggccacaccaggctaatccaaagga

SEQ ID NO: 543 - DNA, 37 bp, Artificial Sequence
  Description of Artificial Sequence: Synthetic primer
  Description of Combined DNA/RNA Molecule: Synthetic primer
acgacgacgacgaaagggaggccacaccaggcuaatt

SEQ ID NO: 544 - DNA, 61 bp, Artificial Sequence
  Description of Artificial Sequence: Synthetic primer
  Description of Combined DNA/RNA Molecule: Synthetic primer
acgacgacgacttgacgaacataatcttaccttaatagtcctgtccatttggccaagtcta

SEQ ID NO: 545 - DNA, 49 bp, Artificial Sequence
  Description of Artificial Sequence: Synthetic oligonucleotide
  Description of Combined DNA/RNA Molecule: Synthetic oligonucleotide
taatctccagacctccgaaccgctgcaaggtcaggctgtaatcaggttg

SEQ ID NO: 546 - DNA, 53 bp, Artificial Sequence
  Description of Artificial Sequence: Synthetic oligonucleotide
ggtcaatgtgtggaatattggagggctcagcggtgtaaggattgaacgggaca

SEQ ID NO: 547 - DNA, 34 bp, Artificial Sequence
  Description of Artificial Sequence: Synthetic probe
ttgtaatcaggtcaatgtgtggaatattggaggg

SEQ ID NO: 548 - DNA, 21 bp, Artificial Sequence
  Description of Artificial Sequence: Synthetic primer
taatctccagacctccgaacc

SEQ ID NO: 549 - DNA, 22 bp, Artificial Sequence
  Description of Artificial Sequence: Synthetic primer
tgtcccgttcaatccttacacc

SEQ ID NO: 550 - DNA, 50 bp, Artificial Sequence
  Description of Artificial Sequence: Synthetic primer
  Description of Combined DNA/RNA Molecule: Synthetic primer
tgtcccgttcaatccttacacctccatttggccaagtctgcagttgagct

SEQ ID NO: 551 - DNA, 42 bp, Artificial Sequence
  Description of Artificial Sequence: Synthetic primer
  Description of Combined DNA/RNA Molecule: Synthetic primer
acgacgacgacgaacccagccaaggccagaaaagtcaatgga

SEQ ID NO: 552 - DNA, 39 bp, Artificial Sequence
  Description of Artificial Sequence: Synthetic primer
  Description of Combined DNA/RNA Molecule: Synthetic primer
acgacgacgacgaagcacccagccaaggccagaaaagtt

SEQ ID NO: 553 - DNA, 55 bp, Artificial Sequence
  Description of Artificial Sequence: Synthetic primer
  Description of Combined DNA/RNA Molecule: Synthetic primer
acgacgacgacttgacgaacataatctggagcactgacttggctctgaacactgt

SEQ ID NO: 554 - DNA, 51 bp, Artificial Sequence
  Description of Artificial Sequence: Synthetic oligonucleotide
  Description of Combined DNA/RNA Molecule: Synthetic oligonucleotide
tcacgcacgtagggtctaaacgcaacactcagctaggttcagtacagtcca

SEQ ID NO: 555 - DNA, 44 bp, Artificial Sequence
  Description of Artificial Sequence: Synthetic oligonucleotide
gtctgggcacagggctcagagggtgttgtccggctgtggttaca

SEQ ID NO: 556 - DNA, 24 bp, Artificial Sequence
  Description of Artificial Sequence: Synthetic probe
aacagtacagtctgggcacagggc

SEQ ID NO: 557 - DNA, 21 bp, Artificial Sequence
  Description of Artificial Sequence: Synthetic primer
tcacgcacgtagggtctaaac

SEQ ID NO: 558 - DNA, 20 bp, Artificial Sequence
  Description of Artificial Sequence: Synthetic primer
tgtaaccacagccggacaac

SEQ ID NO: 559 - DNA, 50 bp, Artificial Sequence
  Description of Artificial Sequence: Synthetic primer
  Description of Combined DNA/RNA Molecule: Synthetic primer
tgtaaccacagccggacaacgctctgaacactgctgactccctttgagct

SEQ ID NO: 560 - DNA, 37 bp, Artificial Sequence
  Description of Artificial Sequence: Synthetic primer
  Description of Combined DNA/RNA Molecule: Synthetic primer
acgacgacgacgaaccagcaggctggcatgcagggac

SEQ ID NO: 561 - DNA, 38 bp, Artificial Sequence
  Description of Artificial Sequence: Synthetic primer
  Description of Combined DNA/RNA Molecule: Synthetic primer
acgacgacgacgaaaggcttccacccagcaggcuggcg

SEQ ID NO: 562 - DNA, 54 bp, Artificial Sequence
  Description of Artificial Sequence: Synthetic primer
  Description of Combined DNA/RNA Molecule: Synthetic primer
acgacgacgacttgacgaacataatggcagtgaagtgcatcactgaggcuggga

SEQ ID NO: 563 - DNA, 47 bp, Artificial Sequence
  Description of Artificial Sequence: Synthetic oligonucleotide
  Description of Combined DNA/RNA Molecule: Synthetic oligonucleotide
tgtgccttacggaaaacccacaccaagatcctgctgggaacaggcct

SEQ ID NO: 564 - DNA, 40 bp, Artificial Sequence
  Description of Artificial Sequence: Synthetic oligonucleotide
ggctctggccccacagtgagctggagctagttcggcgaca

SEQ ID NO: 565 - DNA, 21 bp, Artificial Sequence
  Description of Artificial Sequence: Synthetic probe
aagggaacaggctctggcccc

SEQ ID NO: 566 - DNA, 20 bp, Artificial Sequence
  Description of Artificial Sequence: Synthetic primer
tgtgccttacggaaaaccca

SEQ ID NO: 567 - DNA, 19 bp, Artificial Sequence
  Description of Artificial Sequence: Synthetic primer
tgtcgccgaactagctcca

SEQ ID NO: 568 - DNA, 42 bp, Artificial Sequence
  Description of Artificial Sequence: Synthetic primer
  Description of Combined DNA/RNA Molecule: Synthetic primer
tgtcgccgaactagctccagctgaggctgggctcattgtgga

SEQ ID NO: 569 - DNA, 41 bp, Artificial Sequence
  Description of Artificial Sequence: Synthetic primer
  Description of Combined DNA/RNA Molecule: Synthetic primer
acgacgacgacgaacccacagccagcaagcttctcagcttc

SEQ ID NO: 570 - DNA, 38 bp, Artificial Sequence
  Description of Artificial Sequence: Synthetic primer
  Description of Combined DNA/RNA Molecule: Synthetic primer
acgacgacgacgaaccacccacagccagcaagcutctt

SEQ ID NO: 571 - DNA, 52 bp, Artificial Sequence
  Description of Artificial Sequence: Synthetic primer
  Description of Combined DNA/RNA Molecule: Synthetic primer
acgacgacgacttgacgaacataatgcctgctctctggttctgtgcauctga

SEQ ID NO: 572 - DNA, 50 bp, Artificial Sequence
  Description of Artificial Sequence: Synthetic oligonucleotide
  Description of Combined DNA/RNA Molecule: Synthetic oligonucleotide
tggacacttcgcccttcttaacccagtgtgagctgggaggacgcaggtca

SEQ ID NO: 573 - DNA, 50 bp, Artificial Sequence
  Description of Artificial Sequence: Synthetic oligonucleotide
ggttgcagacatgaccagcaacagacagagtttgggatctgggcatcaca

SEQ ID NO: 574 - DNA, 25 bp, Artificial Sequence
  Description of Artificial Sequence: Synthetic probe
ttggacgcaggttgcagacatgacc

SEQ ID NO: 575 - DNA, 22 bp, Artificial Sequence
  Description of Artificial Sequence: Synthetic primer
tggacacttcgcccttcttaac

SEQ ID NO: 576 - DNA, 21 bp, Artificial Sequence
  Description of Artificial Sequence: Synthetic primer
tgtgatgcccagatcccaaac

SEQ ID NO: 577 - DNA, 51 bp, Artificial Sequence
  Description of Artificial Sequence: Synthetic primer
  Description of Combined DNA/RNA Molecule: Synthetic primer
tgtgatgcccagatcccaaacctgtgcatctggtggtctgtctgctgctga

SEQ ID NO: 578 - DNA, 42 bp, Artificial Sequence
  Description of Artificial Sequence: Synthetic primer
  Description of Combined DNA/RNA Molecule: Synthetic primer
acgacgacgacgaaagtgtcagcattgagaggtcccagggaa

SEQ ID NO: 579 - DNA, 45 bp, Artificial Sequence
  Description of Artificial Sequence: Synthetic primer
  Description of Combined DNA/RNA Molecule: Synthetic primer
acgacgacgacgaaccacaggtcatcagtgtcagcattgagggat

SEQ ID NO: 580 - DNA, 54 bp, Artificial Sequence
  Description of Artificial Sequence: Synthetic primer
  Description of Combined DNA/RNA Molecule: Synthetic primer
acgacgacgacttgacgaacataatgagaggctcttttgctcctcccaaagcaa

SEQ ID NO: 581 - DNA, 44 bp, Artificial Sequence
  Description of Artificial Sequence: Synthetic oligonucleotide
  Description of Combined DNA/RNA Molecule: Synthetic oligonucleotide
ttgtctctgcgacccatcaacagttgcagggcagcaacagcaat

SEQ ID NO: 582 - DNA, 46 bp, Artificial Sequence
  Description of Artificial Sequence: Synthetic oligonucleotide
gcagccaggtcatcagaagcacagtggttggtacacgttcggcaca

SEQ ID NO: 583 - DNA, 24 bp, Artificial Sequence
  Description of Artificial Sequence: Synthetic probe
ttagcaacagcagccaggtcatca

SEQ ID NO: 584 - DNA, 20 bp, Artificial Sequence
  Description of Artificial Sequence: Synthetic primer
ttgtctctgcgacccatcaa

SEQ ID NO: 585 - DNA, 19 bp, Artificial Sequence
  Description of Artificial Sequence: Synthetic primer
tgtgccgaacgtgtaccaa

SEQ ID NO: 586 - DNA, 45 bp, Artificial Sequence
  Description of Artificial Sequence: Synthetic primer
  Description of Combined DNA/RNA Molecule: Synthetic primer
tgtgccgaacgtgtaccaagctcctcccaaagcagggagtggctt

SEQ ID NO: 587 - DNA, 38 bp, Artificial Sequence
  Description of Artificial Sequence: Synthetic primer
  Description of Combined DNA/RNA Molecule: Synthetic primer
acgacgacgacgaaacccagccacacccacacactctt

SEQ ID NO: 588 - DNA, 47 bp, Artificial Sequence
  Description of Artificial Sequence: Synthetic primer
  Description of Combined DNA/RNA Molecule: Synthetic primer
acgacgacgacgaacaaggaagctccataaaagccctgtcacaacct

SEQ ID NO: 589 - DNA, 51 bp, Artificial Sequence
  Description of Artificial Sequence: Synthetic primer
  Description of Combined DNA/RNA Molecule: Synthetic primer
acgacgacgacttgacgaacataatggtggctggtgtgtgggtgtggctga

SEQ ID NO: 590 - DNA, 48 bp, Artificial Sequence
  Description of Artificial Sequence: Synthetic oligonucleotide
  Description of Combined DNA/RNA Molecule: Synthetic oligonucleotide
tcctgaattggccacaccacctggctctcacccctcagaggcactcgt

SEQ ID NO: 591 - DNA, 50 bp, Artificial Sequence
  Description of Artificial Sequence: Synthetic oligonucleotide
ctcacccaacagcatagtacttgccacccgtgactgagcgacgtctaaca

SEQ ID NO: 592 - DNA, 28 bp, Artificial Sequence
  Description of Artificial Sequence: Synthetic probe
aaagaggcactcacccaacagcatagta

SEQ ID NO: 593 - DNA, 20 bp, Artificial Sequence
  Description of Artificial Sequence: Synthetic primer
tcctgaattggccacaccac

SEQ ID NO: 594 - DNA, 21 bp, Artificial Sequence
  Description of Artificial Sequence: Synthetic primer
tgttagacgtcgctcagtcac

SEQ ID NO: 595 - DNA, 45 bp, Artificial Sequence
  Description of Artificial Sequence: Synthetic primer
  Description of Combined DNA/RNA Molecule: Synthetic primer
tgttagacgtcgctcagtcactgtgtgggtgtggctggatggcag

SEQ ID NO: 596 - DNA, 36 bp, Artificial Sequence
  Description of Artificial Sequence: Synthetic primer
  Description of Combined DNA/RNA Molecule: Synthetic primer
acgacgacgacgaacccctcccctcctggcaggagc

SEQ ID NO: 597 - DNA, 41 bp, Artificial Sequence
  Description of Artificial Sequence: Synthetic primer
  Description of Combined DNA/RNA Molecule: Synthetic primer
acgacgacgacgaagcagttgctgagccttcccctcccctt

SEQ ID NO: 598 - DNA, 55 bp, Artificial Sequence
  Description of Artificial Sequence: Synthetic primer
  Description of Combined DNA/RNA Molecule: Synthetic primer
acgacgacgacttgacgaacataatggattgtggagctgtgtctggaggagtgcc

SEQ ID NO: 599 - DNA, 42 bp, Artificial Sequence
  Description of Artificial Sequence: Synthetic oligonucleotide
  Description of Combined DNA/RNA Molecule: Synthetic oligonucleotide
tcctcgagccgatgacacaggccaggaggcagagccagaggg

SEQ ID NO: 600 - DNA, 47 bp, Artificial Sequence
  Description of Artificial Sequence: Synthetic oligonucleotide
gagaaagggttggaggtgtccatgtccatgtaacgtccgtgggctaa

SEQ ID NO: 601 - DNA, 26 bp, Artificial Sequence
  Description of Artificial Sequence: Synthetic probe
ttagagccagagaaagggttggaggt

SEQ ID NO: 602 - DNA, 19 bp, Artificial Sequence
  Description of Artificial Sequence: Synthetic primer
tcctcgagccgatgacaca

SEQ ID NO: 603 - DNA, 19 bp, Artificial Sequence
  Description of Artificial Sequence: Synthetic primer
ttagcccacggacgttaca

SEQ ID NO: 604 - DNA, 48 bp, Artificial Sequence
  Description of Artificial Sequence: Synthetic primer
  Description of Combined DNA/RNA Molecule: Synthetic primer
ttagcccacggacgttacatgtgtctggaggagtgctggacgtggacg

SEQ ID NO: 605 - DNA, 38 bp, Artificial Sequence
  Description of Artificial Sequence: Synthetic primer
  Description of Combined DNA/RNA Molecule: Synthetic primer
acgacgacgacgaagctcccctgctccacaccacacct

SEQ ID NO: 606 - DNA, 39 bp, Artificial Sequence
  Description of Artificial Sequence: Synthetic primer
  Description of Combined DNA/RNA Molecule: Synthetic primer
acgacgacgacgaagctccacagctcccctgctccacat

SEQ ID NO: 607 - DNA, 52 bp, Artificial Sequence
  Description of Artificial Sequence: Synthetic primer
  Description of Combined DNA/RNA Molecule: Synthetic primer
acgacgacgacttgacgaacataatgggtggtggctgaggctacagagctga

SEQ ID NO: 608 - DNA, 45 bp, Artificial Sequence
  Description of Artificial Sequence: Synthetic oligonucleotide
  Description of Combined DNA/RNA Molecule: Synthetic oligonucleotide
ttcttgcggttctggaacacacccacccccaggactcgcagtatg

SEQ ID NO: 609 - DNA, 52 bp, Artificial Sequence
  Description of Artificial Sequence: Synthetic oligonucleotide
gtacactcccacaccactatcttgccatcccgtgatgctccgttgttgctaa

SEQ ID NO: 610 - DNA, 25 bp, Artificial Sequence
  Description of Artificial Sequence: Synthetic probe
ttactcgcagtacactcccacacca

SEQ ID NO: 611 - DNA, 20 bp, Artificial Sequence
  Description of Artificial Sequence: Synthetic primer
ttcttgcggttctggaacac

SEQ ID NO: 612 - DNA, 21 bp, Artificial Sequence
  Description of Artificial Sequence: Synthetic primer
ttagcaacaacggagcatcac

SEQ ID NO: 613 - DNA, 48 bp, Artificial Sequence
  Description of Artificial Sequence: Synthetic primer
  Description of Combined DNA/RNA Molecule: Synthetic primer
ttagcaacaacggagcatcactggctgaggctacagagctgatggcaa

SEQ ID NO: 614 - DNA, 40 bp, Artificial Sequence
  Description of Artificial Sequence: Synthetic primer
  Description of Combined DNA/RNA Molecule: Synthetic primer
acgacgacgacgaactgctggagcacagcacctcagttgt

SEQ ID NO: 615 - DNA, 38 bp, Artificial Sequence
  Description of Artificial Sequence: Synthetic primer
  Description of Combined DNA/RNA Molecule: Synthetic primer
acgacgacgacgaagcagctgctggagcacagcacctt

SEQ ID NO: 616 - DNA, 55 bp, Artificial Sequence
  Description of Artificial Sequence: Synthetic primer
  Description of Combined DNA/RNA Molecule: Synthetic primer
acgacgacgacttgacgaacataatcctctggagagagaggctggagtgaggcta

SEQ ID NO: 617 - DNA, 47 bp, Artificial Sequence
  Description of Artificial Sequence: Synthetic oligonucleotide
  Description of Combined DNA/RNA Molecule: Synthetic oligonucleotide
tcgcaacgtgccgaatacacactagtgcagggatgtgccccagcctg

SEQ ID NO: 618 - DNA, 51 bp, Artificial Sequence
  Description of Artificial Sequence: Synthetic oligonucleotide
gcccatcctcattgaaatgcagcacttcacactgttgcacggtcgagctaa

SEQ ID NO: 619 - DNA, 23 bp, Artificial Sequence
  Description of Artificial Sequence: Synthetic probe
aatgccccagcccatcctcattg

SEQ ID NO: 620 - DNA, 19 bp, Artificial Sequence
  Description of Artificial Sequence: Synthetic primer
tcgcaacgtgccgaataca

SEQ ID NO: 621 - DNA, 19 bp, Artificial Sequence
  Description of Artificial Sequence: Synthetic primer
ttagctcgaccgtgcaaca

SEQ ID NO: 622 - DNA, 47 bp, Artificial Sequence
  Description of Artificial Sequence: Synthetic primer
  Description of Combined DNA/RNA Molecule: Synthetic primer
ttagctcgaccgtgcaacaggagtgaggctgtgtgaagtgttgcatc

SEQ ID NO: 623 - DNA, 41 bp, Artificial Sequence
  Description of Artificial Sequence: Synthetic primer
  Description of Combined DNA/RNA Molecule: Synthetic primer
acgacgacgacgaagcacttgggtgcatccagaccaucagg

SEQ ID NO: 624 - DNA, 40 bp, Artificial Sequence
  Description of Artificial Sequence: Synthetic primer
  Description of Combined DNA/RNA Molecule: Synthetic primer
acgacgacgacgaatgcagcacttgggtgcatccagaccg

SEQ ID NO: 625 - DNA, 51 bp, Artificial Sequence
  Description of Artificial Sequence: Synthetic primer
  Description of Combined DNA/RNA Molecule: Synthetic primer
acgacgacgacttgacgaacataatccctgctgctgctgacccttagaact

SEQ ID NO: 626 - DNA, 50 bp, Artificial Sequence
  Description of Artificial Sequence: Synthetic oligonucleotide
  Description of Combined DNA/RNA Molecule: Synthetic oligonucleotide
tagccgatggcgtaaaaccctttgtttggcaacagtcagaagacacaaaa

SEQ ID NO: 627 - DNA, 47 bp, Artificial Sequence
  Description of Artificial Sequence: Synthetic oligonucleotide
caagaggagaggtcctcccactgaacaggtcgtatgacttgctcgca

SEQ ID NO: 628 - DNA, 28 bp, Artificial Sequence
  Description of Artificial Sequence: Synthetic probe
ttgaagacacaagaggagaggtcctccc

SEQ ID NO: 629 - DNA, 19 bp, Artificial Sequence
  Description of Artificial Sequence: Synthetic primer
tagccgatggcgtaaaacc

SEQ ID NO: 630 - DNA, 20 bp, Artificial Sequence
  Description of Artificial Sequence: Synthetic primer
tgcgagcaagtcatacgacc

SEQ ID NO: 631 - DNA, 46 bp, Artificial Sequence
  Description of Artificial Sequence: Synthetic primer
  Description of Combined DNA/RNA Molecule: Synthetic primer
tgcgagcaagtcatacgaccgctgtcaaccctgctgctgttgacct

SEQ ID NO: 632 - DNA, 47 bp, Artificial Sequence
  Description of Artificial Sequence: Synthetic primer
  Description of Combined DNA/RNA Molecule: Synthetic primer
acgacgacgacgaacagcatcaccaaggcttagacactttcaugcaa

SEQ ID NO: 633 - DNA, 39 bp, Artificial Sequence
  Description of Artificial Sequence: Synthetic primer
  Description of Combined DNA/RNA Molecule: Synthetic primer
acgacgacgacgaacagggcagcatcaccaaggcutagg

SEQ ID NO: 634 - DNA, 59 bp, Artificial Sequence
  Description of Artificial Sequence: Synthetic primer
  Description of Combined DNA/RNA Molecule: Synthetic primer
acgacgacgacttgacgaacataatcttctctgaggtgtgttcactggatcagagataa

SEQ ID NO: 635 - DNA, 50 bp, Artificial Sequence
  Description of Artificial Sequence: Synthetic oligonucleotide
  Description of Combined DNA/RNA Molecule: Synthetic oligonucleotide
tcagacgcactaaacaggcaaggagggacaacaactcccctcgcacctct

SEQ ID NO: 636 - DNA, 46 bp, Artificial Sequence
  Description of Artificial Sequence: Synthetic oligonucleotide
ccttcatggccccaactcagcactctgttgcggatcgtcgtgtgaa

SEQ ID NO: 637 - DNA, 22 bp, Artificial Sequence
  Description of Artificial Sequence: Synthetic probe
ttcctcgcaccttcatggcccc

SEQ ID NO: 638 - DNA, 21 bp, Artificial Sequence
  Description of Artificial Sequence: Synthetic primer
tcagacgcactaaacaggcaa

SEQ ID NO: 639 - DNA, 19 bp, Artificial Sequence
  Description of Artificial Sequence: Synthetic primer
ttcacacgacgatccgcaa

SEQ ID NO: 640 - DNA, 53 bp, Artificial Sequence
  Description of Artificial Sequence: Synthetic primer
  Description of Combined DNA/RNA Molecule: Synthetic primer
ttcacacgacgatccgcaagttcactggatcagagatagcagagtgttgagtc

SEQ ID NO: 641 - DNA, 40 bp, Artificial Sequence
  Description of Artificial Sequence: Synthetic primer
  Description of Combined DNA/RNA Molecule: Synthetic primer
acgacgacgacgaactgctgggcctcagactcacagtgtt

SEQ ID NO: 642 - DNA, 37 bp, Artificial Sequence
  Description of Artificial Sequence: Synthetic primer
  Description of Combined DNA/RNA Molecule: Synthetic primer
acgacgacgacgaagggctgctgggcctcagactcat

SEQ ID NO: 643 - DNA, 53 bp, Artificial Sequence
  Description of Artificial Sequence: Synthetic primer
  Description of Combined DNA/RNA Molecule: Synthetic primer
acgacgacgacttgacgaacataattgcctctggtacagtgcctggtaggtga

SEQ ID NO: 644 - DNA, 45 bp, Artificial Sequence
  Description of Artificial Sequence: Synthetic oligonucleotide
  Description of Combined DNA/RNA Molecule: Synthetic oligonucleotide
ttcagagcacctgcgtaccctgcctcatggccctgaatcactatt

SEQ ID NO: 645 - DNA, 44 bp, Artificial Sequence
  Description of Artificial Sequence: Synthetic oligonucleotide
ctacctgctcatcacccaggcacccggttcttcggctggctcaa

SEQ ID NO: 646 - DNA, 29 bp, Artificial Sequence
  Description of Artificial Sequence: Synthetic probe
aatgaatcactacctgctcatcacccagg

SEQ ID NO: 647 - DNA, 19 bp, Artificial Sequence
  Description of Artificial Sequence: Synthetic primer
ttcagagcacctgcgtacc

SEQ ID NO: 648 - DNA, 19 bp, Artificial Sequence
  Description of Artificial Sequence: Synthetic primer
ttgagccagccgaagaacc

SEQ ID NO: 649 - DNA, 48 bp, Artificial Sequence
  Description of Artificial Sequence: Synthetic primer
  Description of Combined DNA/RNA Molecule: Synthetic primer
ttgagccagccgaagaaccctggtacagtgcctggtaggtgatgggta

SEQ ID NO: 650 - DNA, 44 bp, Artificial Sequence
  Description of Artificial Sequence: Synthetic primer
  Description of Combined DNA/RNA Molecule: Synthetic primer
acgacgacgacgaacccccaggatcacttcagtaaggcacttct

SEQ ID NO: 651 - DNA, 41 bp, Artificial Sequence
  Description of Artificial Sequence: Synthetic primer
  Description of Combined DNA/RNA Molecule: Synthetic primer
acgacgacgacgaagagcacccccaggatcacttcagtaaa

SEQ ID NO: 652 - DNA, 49 bp, Artificial Sequence
  Description of Artificial Sequence: Synthetic primer
  Description of Combined DNA/RNA Molecule: Synthetic primer
acgacgacgacttgacgaacataatgatgcctggcagcagtgccccctt

SEQ ID NO: 653 - DNA, 44 bp, Artificial Sequence
  Description of Artificial Sequence: Synthetic oligonucleotide
  Description of Combined DNA/RNA Molecule: Synthetic oligonucleotide
taacgggattgagagtggacaacccccagcacctgaacaccagt

SEQ ID NO: 654 - DNA, 52 bp, Artificial Sequence
  Description of Artificial Sequence: Synthetic oligonucleotide
ccaacttcaccaagaacactcctaactccaggctgtctgccgcccttactaa

SEQ ID NO: 655 - DNA, 31 bp, Artificial Sequence
  Description of Artificial Sequence: Synthetic probe
ttctgaacaccaacttcaccaagaacactcc

SEQ ID NO: 656 - DNA, 21 bp, Artificial Sequence
  Description of Artificial Sequence: Synthetic primer
taacgggattgagagtggaca

SEQ ID NO: 657 - DNA, 19 bp, Artificial Sequence
  Description of Artificial Sequence: Synthetic primer
ttagtaagggcggcagaca

SEQ ID NO: 658 - DNA, 43 bp, Artificial Sequence
  Description of Artificial Sequence: Synthetic primer
  Description of Combined DNA/RNA Molecule: Synthetic primer
ttagtaagggcggcagacagcagcagtgccccctctatgctgt

SEQ ID NO: 659 - DNA, 39 bp, Artificial Sequence
  Description of Artificial Sequence: Synthetic primer
  Description of Combined DNA/RNA Molecule: Synthetic primer
acgacgacgacgaagggtgaggcagatggtgacagggaa

SEQ ID NO: 660 - DNA, 37 bp, Artificial Sequence
  Description of Artificial Sequence: Synthetic primer
  Description of Combined DNA/RNA Molecule: Synthetic primer
acgacgacgacgaagcatgagggtgaggcagauggta

SEQ ID NO: 661 - DNA, 52 bp, Artificial Sequence
  Description of Artificial Sequence: Synthetic primer
  Description of Combined DNA/RNA Molecule: Synthetic primer
acgacgacgacttgacgaacataatctttcaccctgcccctgactccuctct

SEQ ID NO: 662 - DNA, 44 bp, Artificial Sequence
  Description of Artificial Sequence: Synthetic oligonucleotide
  Description of Combined DNA/RNA Molecule: Synthetic oligonucleotide
ttgagaccgctgaccgacaccagggattggagggttacaccctt

SEQ ID NO: 663 - DNA, 53 bp, Artificial Sequence
  Description of Artificial Sequence: Synthetic oligonucleotide
cccccacaatccaactcctttagtgcatagtacctgttgcacggtcgagctaa

SEQ ID NO: 664 - DNA, 27 bp, Artificial Sequence
  Description of Artificial Sequence: Synthetic probe
ttggttacacccccacaatccaactcc

SEQ ID NO: 665 - DNA, 19 bp, Artificial Sequence
  Description of Artificial Sequence: Synthetic primer
ttgagaccgctgaccgaca

SEQ ID NO: 666 - DNA, 19 bp, Artificial Sequence
  Description of Artificial Sequence: Synthetic primer
ttagctcgaccgtgcaaca

SEQ ID NO: 667 - DNA, 46 bp, Artificial Sequence
  Description of Artificial Sequence: Synthetic primer
  Description of Combined DNA/RNA Molecule: Synthetic primer
ttagctcgaccgtgcaacacttaacctttcaccctgcccttgactt

SEQ ID NO: 668 - DNA, 43 bp, Artificial Sequence
  Description of Artificial Sequence: Synthetic primer
  Description of Combined DNA/RNA Molecule: Synthetic primer
acgacgacgacgaaggacaacaatctcagcccactgcagccaa

SEQ ID NO: 669 - DNA, 45 bp, Artificial Sequence
  Description of Artificial Sequence: Synthetic primer
  Description of Combined DNA/RNA Molecule: Synthetic primer
acgacgacgacgaagacagaggacaacaatctcagcccacugcaa

SEQ ID NO: 670 - DNA, 50 bp, Artificial Sequence
  Description of Artificial Sequence: Synthetic primer
  Description of Combined DNA/RNA Molecule: Synthetic primer
acgacgacgacttgacgaacataatctgagcagcctggtgtgggagtgaa

SEQ ID NO: 671 - DNA, 42 bp, Artificial Sequence
  Description of Artificial Sequence: Synthetic oligonucleotide
  Description of Combined DNA/RNA Molecule: Synthetic oligonucleotide
tttcgctcgacgcataccagccacagcccagcactcacacct

SEQ ID NO: 672 - DNA, 42 bp, Artificial Sequence
  Description of Artificial Sequence: Synthetic oligonucleotide
cactcaccctggctggctcaccctggcgcggctactgtaaaa

SEQ ID NO: 673 - DNA, 24 bp, Artificial Sequence
  Description of Artificial Sequence: Synthetic probe
ttgcactcacactcaccctggctg

SEQ ID NO: 674 - DNA, 19 bp, Artificial Sequence
  Description of Artificial Sequence: Synthetic primer
tttcgctcgacgcatacca

SEQ ID NO: 675 - DNA, 19 bp, Artificial Sequence
  Description of Artificial Sequence: Synthetic primer
ttttacagtagccgcgcca

SEQ ID NO: 676 - DNA, 45 bp, Artificial Sequence
  Description of Artificial Sequence: Synthetic primer
  Description of Combined DNA/RNA Molecule: Synthetic primer
ttttacagtagccgcgccaggtgtgggagtgagtgtggatgagct

SEQ ID NO: 677 - DNA, 38 bp, Artificial Sequence
  Description of Artificial Sequence: Synthetic primer
  Description of Combined DNA/RNA Molecule: Synthetic primer
acgacgacgacgaaagccccactccacagcacaccacg

SEQ ID NO: 678 - DNA, 37 bp, Artificial Sequence
  Description of Artificial Sequence: Synthetic primer
  Description of Combined DNA/RNA Molecule: Synthetic primer
acgacgacgacgaagccccagccccactccacagcat

SEQ ID NO: 679 - DNA, 49 bp, Artificial Sequence
  Description of Artificial Sequence: Synthetic primer
  Description of Combined DNA/RNA Molecule: Synthetic primer
acgacgacgacttgacgaacataatgctgaggctgaggatgccaggtga

SEQ ID NO: 680 - DNA, 44 bp, Artificial Sequence
  Description of Artificial Sequence: Synthetic oligonucleotide
  Description of Combined DNA/RNA Molecule: Synthetic oligonucleotide
tctgcccaaaatactgcacaacccaaggctcaggcctcacacga

SEQ ID NO: 681 - DNA, 43 bp, Artificial Sequence
  Description of Artificial Sequence: Synthetic oligonucleotide
cacagctgcagccagtgccctcttgaaactgaggcggtgttca

SEQ ID NO: 682 - DNA, 21 bp, Artificial Sequence
  Description of Artificial Sequence: Synthetic probe
ttggcctcacacagctgcagc

SEQ ID NO: 683 - DNA, 21 bp, Artificial Sequence
  Description of Artificial Sequence: Synthetic primer
tctgcccaaaatactgcacaa

SEQ ID NO: 684 - DNA, 21 bp, Artificial Sequence
  Description of Artificial Sequence: Synthetic primer
tgaacaccgcctcagtttcaa

SEQ ID NO: 685 - DNA, 44 bp, Artificial Sequence
  Description of Artificial Sequence: Synthetic primer
  Description of Combined DNA/RNA Molecule: Synthetic primer
tgaacaccgcctcagtttcaaccaggtggaggcttggttggaga

SEQ ID NO: 686 - DNA, 38 bp, Artificial Sequence
  Description of Artificial Sequence: Synthetic primer
  Description of Combined DNA/RNA Molecule: Synthetic primer
acgacgacgacgaaagccaccacaccagtgccaccacc

SEQ ID NO: 687 - DNA, 38 bp, Artificial Sequence
  Description of Artificial Sequence: Synthetic primer
  Description of Combined DNA/RNA Molecule: Synthetic primer
acgacgacgacgaagctgccccagccaccacaccagta

SEQ ID NO: 688 - DNA, 48 bp, Artificial Sequence
  Description of Artificial Sequence: Synthetic primer
  Description of Combined DNA/RNA Molecule: Synthetic primer
acgacgacgacttgacgaacataattggccctgaggcctgacaggagt

SEQ ID NO: 689 - DNA, 45 bp, Artificial Sequence
  Description of Artificial Sequence: Synthetic oligonucleotide
  Description of Combined DNA/RNA Molecule: Synthetic oligonucleotide
tcccttagagagaacgcccaccagtggagttgcctcctcactttt

SEQ ID NO: 690 - DNA, 52 bp, Artificial Sequence
  Description of Artificial Sequence: Synthetic oligonucleotide
cttccctagggtggttcagctccaccaaactggtgacgtacgagtgttctta

SEQ ID NO: 691 - DNA, 28 bp, Artificial Sequence
  Description of Artificial Sequence: Synthetic probe
ttctcctcacttccctagggtggttcag

SEQ ID NO: 692 - DNA, 20 bp, Artificial Sequence
  Description of Artificial Sequence: Synthetic primer
tcccttagagagaacgccca

SEQ ID NO: 693 - DNA, 22 bp, Artificial Sequence
  Description of Artificial Sequence: Synthetic primer
taagaacactcgtacgtcacca

SEQ ID NO: 694 - DNA, 47 bp, Artificial Sequence
  Description of Artificial Sequence: Synthetic primer
  Description of Combined DNA/RNA Molecule: Synthetic primer
taagaacactcgtacgtcaccacctgaggcctgacaggagttugacg

SEQ ID NO: 695 - DNA, 39 bp, Artificial Sequence
  Description of Artificial Sequence: Synthetic primer
  Description of Combined DNA/RNA Molecule: Synthetic primer
acgacgacgacgaaccctcttgtccccccatgcacagga

SEQ ID NO: 696 - DNA, 39 bp, Artificial Sequence
  Description of Artificial Sequence: Synthetic primer
  Description of Combined DNA/RNA Molecule: Synthetic primer
acgacgacgacgaaccccccatgcacagggcttcctcaa

SEQ ID NO: 697 - DNA, 52 bp, Artificial Sequence
  Description of Artificial Sequence: Synthetic primer
  Description of Combined DNA/RNA Molecule: Synthetic primer
acgacgacgacttgacgaacataatcctggcaggatgtggtggaagcugtga

SEQ ID NO: 698 - DNA, 50 bp, Artificial Sequence
  Description of Artificial Sequence: Synthetic oligonucleotide
  Description of Combined DNA/RNA Molecule: Synthetic oligonucleotide
tagtttgtcgaaagtcccacaccacctcaagggctccatcaaacacactg

SEQ ID NO: 699 - DNA, 44 bp, Artificial Sequence
  Description of Artificial Sequence: Synthetic oligonucleotide
caccaagagccagcccaagctgggtgcaaaattcaggctgtgca

SEQ ID NO: 700 - DNA, 25 bp, Artificial Sequence
  Description of Artificial Sequence: Synthetic probe
tctcaaacacaccaagagccagccc

SEQ ID NO: 701 - DNA, 22 bp, Artificial Sequence
  Description of Artificial Sequence: Synthetic primer
tagtttgtcgaaagtcccacac

SEQ ID NO: 702 - DNA, 21 bp, Artificial Sequence
  Description of Artificial Sequence: Synthetic primer
tgcacagcctgaattttgcac

SEQ ID NO: 703 - DNA, 50 bp, Artificial Sequence
  Description of Artificial Sequence: Synthetic primer
  Description of Combined DNA/RNA Molecule: Synthetic primer
tgcacagcctgaattttgcacggatgtggtggaagctgtggttatggtct

SEQ ID NO: 704 - DNA, 41 bp, Artificial Sequence
  Description of Artificial Sequence: Synthetic primer
  Description of Combined DNA/RNA Molecule: Synthetic primer
acgacgacgacgaacacacagcacagagaccacccactgta

SEQ ID NO: 705 - DNA, 44 bp, Artificial Sequence
  Description of Artificial Sequence: Synthetic primer
  Description of Combined DNA/RNA Molecule: Synthetic primer
acgacgacgacgaaccagtcacacacacagcacagagaccacct

SEQ ID NO: 706 - DNA, 54 bp, Artificial Sequence
  Description of Artificial Sequence: Synthetic primer
  Description of Combined DNA/RNA Molecule: Synthetic primer
acgacgacgacttgacgaacataatcttgggcttcctaacctgggttgacagcc

SEQ ID NO: 707 - DNA, 48 bp, Artificial Sequence
  Description of Artificial Sequence: Synthetic oligonucleotide
  Description of Combined DNA/RNA Molecule: Synthetic oligonucleotide
tacagatacggacgggaatcaaccccacactgcactctcttcaccctc

SEQ ID NO: 708 - DNA, 44 bp, Artificial Sequence
  Description of Artificial Sequence: Synthetic oligonucleotide
cccctctcccacacaggcctccttgtttacatcctcctgcgtca

SEQ ID NO: 709 - DNA, 26 bp, Artificial Sequence
  Description of Artificial Sequence: Synthetic probe
aactcttcacccctctcccacacagg

SEQ ID NO: 710 - DNA, 22 bp, Artificial Sequence
  Description of Artificial Sequence: Synthetic primer
tacagatacggacgggaatcaa

SEQ ID NO: 711 - DNA, 22 bp, Artificial Sequence
  Description of Artificial Sequence: Synthetic primer
tgacgcaggaggatgtaaacaa

SEQ ID NO: 712 - DNA, 51 bp, Artificial Sequence
  Description of Artificial Sequence: Synthetic primer
  Description of Combined DNA/RNA Molecule: Synthetic primer
tgacgcaggaggatgtaaacaagcttcctaacctgggttgacagttggcta

SEQ ID NO: 713 - DNA, 37 bp, Artificial Sequence
  Description of Artificial Sequence: Synthetic primer
  Description of Combined DNA/RNA Molecule: Synthetic primer
acgacgacgacgaagccccaagcccacatgcacagtt

SEQ ID NO: 714 - DNA, 39 bp, Artificial Sequence
  Description of Artificial Sequence: Synthetic primer
  Description of Combined DNA/RNA Molecule: Synthetic primer
acgacgacgacgaaccagtgcacacaggccccaagcccg

SEQ ID NO: 715 - DNA, 54 bp, Artificial Sequence
  Description of Artificial Sequence: Synthetic primer
  Description of Combined DNA/RNA Molecule: Synthetic primer
acgacgacgacttgacgaacataataagtgtgtgaagggcaagtggtgaugggc

SEQ ID NO: 716 - DNA, 44 bp, Artificial Sequence
  Description of Artificial Sequence: Synthetic oligonucleotide
  Description of Combined DNA/RNA Molecule: Synthetic oligonucleotide
ttgttcgcccgttggtcaccagccccatgtacagcctcagacga

SEQ ID NO: 717 - DNA, 40 bp, Artificial Sequence
  Description of Artificial Sequence: Synthetic oligonucleotide
gacaggctcccagccccactggtggagcgctaaggttgca

SEQ ID NO: 718 - DNA, 23 bp, Artificial Sequence
  Description of Artificial Sequence: Synthetic probe
ttagcctcagacaggctcccagc

SEQ ID NO: 719 - DNA, 19 bp, Artificial Sequence
  Description of Artificial Sequence: Synthetic primer
ttgttcgcccgttggtcac

SEQ ID NO: 720 - DNA, 19 bp, Artificial Sequence
  Description of Artificial Sequence: Synthetic primer
tgcaaccttagcgctccac

SEQ ID NO: 721 - DNA, 47 bp, Artificial Sequence
  Description of Artificial Sequence: Synthetic primer
  Description of Combined DNA/RNA Molecule: Synthetic primer
tgcaaccttagcgctccacgggcaagtggtgatgggttctatgccaa

SEQ ID NO: 722 - DNA, 46 bp, Artificial Sequence
  Description of Artificial Sequence: Synthetic primer
  Description of Combined DNA/RNA Molecule: Synthetic primer
acgacgacgacgaatgggaggtgttgtcctcagaaacatcactggt

SEQ ID NO: 723 - DNA, 43 bp, Artificial Sequence
  Description of Artificial Sequence: Synthetic primer
  Description of Combined DNA/RNA Molecule: Synthetic primer
acgacgacgacgaatgctgggaggtgttgtcctcagaaacatt

SEQ ID NO: 724 - DNA, 60 bp, Artificial Sequence
  Description of Artificial Sequence: Synthetic primer
  Description of Combined DNA/RNA Molecule: Synthetic primer
acgacgacgacttgacgaacataatctgaatgttcatcctgtgtgcagtttctgagatgt

SEQ ID NO: 725 - DNA, 51 bp, Artificial Sequence
  Description of Artificial Sequence: Synthetic oligonucleotide
  Description of Combined DNA/RNA Molecule: Synthetic oligonucleotide
taagcctgcttttccgaaacaaagggatggttcagcactttagacauctac

SEQ ID NO: 726 - DNA, 50 bp, Artificial Sequence
  Description of Artificial Sequence: Synthetic oligonucleotide
tctgtcacagacctatctgcaggtcacctttgtattgcgccaggatagca

SEQ ID NO: 727 - DNA, 32 bp, Artificial Sequence
  Description of Artificial Sequence: Synthetic probe
acttagacatctgtcacagacctatctgcagg

SEQ ID NO: 728 - DNA, 22 bp, Artificial Sequence
  Description of Artificial Sequence: Synthetic primer
taagcctgcttttccgaaacaa

SEQ ID NO: 729 - DNA, 21 bp, Artificial Sequence
  Description of Artificial Sequence: Synthetic primer
tgctatcctggcgcaatacaa

SEQ ID NO: 730 - DNA, 52 bp, Artificial Sequence
  Description of Artificial Sequence: Synthetic primer
  Description of Combined DNA/RNA Molecule: Synthetic primer
tgctatcctggcgcaatacaacagtttctgagatgctgggtgaagatgaccc

SEQ ID NO: 731 - DNA, 40 bp, Artificial Sequence
  Description of Artificial Sequence: Synthetic primer
  Description of Combined DNA/RNA Molecule: Synthetic primer
acgacgacgacgaagcctggcaaaccagaagggcauccaa

SEQ ID NO: 732 - DNA, 43 bp, Artificial Sequence
  Description of Artificial Sequence: Synthetic primer
  Description of Combined DNA/RNA Molecule: Synthetic primer
acgacgacgacgaaccagaagagcctggcaaaccagaagggcg

SEQ ID NO: 733 - DNA, 54 bp, Artificial Sequence
  Description of Artificial Sequence: Synthetic primer
  Description of Combined DNA/RNA Molecule: Synthetic primer
acgacgacgacttgacgaacataatgactgtggtctggaaagctggtgggaggc

SEQ ID NO: 734 - DNA, 45 bp, Artificial Sequence
  Description of Artificial Sequence: Synthetic oligonucleotide
  Description of Combined DNA/RNA Molecule: Synthetic oligonucleotide
tttccgccgctacaaccaaacatgcacagaaaggccctcaggctg

SEQ ID NO: 735 - DNA, 41 bp, Artificial Sequence
  Description of Artificial Sequence: Synthetic oligonucleotide
ggccacctttcccagggctctcttgaagcagcgtctgagca

SEQ ID NO: 736 - DNA, 22 bp, Artificial Sequence
  Description of Artificial Sequence: Synthetic probe
ttgccctcaggccacctttccc

SEQ ID NO: 737 - DNA, 19 bp, Artificial Sequence
  Description of Artificial Sequence: Synthetic primer
tttccgccgctacaaccaa

SEQ ID NO: 738 - DNA, 19 bp, Artificial Sequence
  Description of Artificial Sequence: Synthetic primer
tgctcagacgctgcttcaa

SEQ ID NO: 739 - DNA, 43 bp, Artificial Sequence
  Description of Artificial Sequence: Synthetic primer
  Description of Combined DNA/RNA Molecule: Synthetic primer
tgctcagacgctgcttcaagaaagctggtggagggcttgggaa

SEQ ID NO: 740 - DNA, 42 bp, Artificial Sequence
  Description of Artificial Sequence: Synthetic primer
  Description of Combined DNA/RNA Molecule: Synthetic primer
acgacgacgacgaactctgcaacccctaggcaagacacagct

SEQ ID NO: 741 - DNA, 41 bp, Artificial Sequence
  Description of Artificial Sequence: Synthetic primer
  Description of Combined DNA/RNA Molecule: Synthetic primer
acgacgacgacgaacccacacaccagctctgcaacccctaa

SEQ ID NO: 742 - DNA, 55 bp, Artificial Sequence
  Description of Artificial Sequence: Synthetic primer
  Description of Combined DNA/RNA Molecule: Synthetic primer
acgacgacgacttgacgaacataatgggaggacaaggaagagcttgttgcuggga

SEQ ID NO: 743 - DNA, 45 bp, Artificial Sequence
  Description of Artificial Sequence: Synthetic oligonucleotide
  Description of Combined DNA/RNA Molecule: Synthetic oligonucleotide
tagcattcgagaacgcaccaggaggctccctcccaagccacactt

SEQ ID NO: 744 - DNA, 47 bp, Artificial Sequence
  Description of Artificial Sequence: Synthetic oligonucleotide
caccccagaccacaccacaatgcctcggtgctagtcacacagttcca

SEQ ID NO: 745 - DNA, 23 bp, Artificial Sequence
  Description of Artificial Sequence: Synthetic probe
ttcaagccacaccccagaccaca

SEQ ID NO: 746 - DNA, 19 bp, Artificial Sequence
  Description of Artificial Sequence: Synthetic primer
tagcattcgagaacgcacc

SEQ ID NO: 747 - DNA, 21 bp, Artificial Sequence
  Description of Artificial Sequence: Synthetic primer
tggaactgtgtgactagcacc

SEQ ID NO: 748 - DNA, 49 bp, Artificial Sequence
  Description of Artificial Sequence: Synthetic primer
  Description of Combined DNA/RNA Molecule: Synthetic primer
tggaactgtgtgactagcaccttgctgaggtgatgaggcattatggtgc

SEQ ID NO: 749 - DNA, 46 bp, Artificial Sequence
  Description of Artificial Sequence: Synthetic primer
  Description of Combined DNA/RNA Molecule: Synthetic primer
acgacgacgacgaacagaaagaaaagaggtagcaagccccagacag

SEQ ID NO: 750 - DNA, 47 bp, Artificial Sequence
  Description of Artificial Sequence: Synthetic primer
  Description of Combined DNA/RNA Molecule: Synthetic primer
acgacgacgacgaacagggaggcagaaagaaaagaggtagcaagcct

SEQ ID NO: 751 - DNA, 53 bp, Artificial Sequence
  Description of Artificial Sequence: Synthetic primer
  Description of Combined DNA/RNA Molecule: Synthetic primer
acgacgacgacttgacgaacataatccaccccccagtgttctgtttccuttta

SEQ ID NO: 752 - DNA, 61 bp, Artificial Sequence
  Description of Artificial Sequence: Synthetic oligonucleotide
  Description of Combined DNA/RNA Molecule: Synthetic oligonucleotide
tctacagctagatgcggccaggatccttaattacagataaaaggcaaacaaaatcauacgt

SEQ ID NO: 753 - DNA, 52 bp, Artificial Sequence
  Description of Artificial Sequence: Synthetic oligonucleotide
tacaccacattttccacatgtcagctgacagctggctccgttactctgtcga

SEQ ID NO: 754 - DNA, 34 bp, Artificial Sequence
  Description of Artificial Sequence: Synthetic probe
ttaaaatcatacaccacattttccacatgtcagc

SEQ ID NO: 755 - DNA, 20 bp, Artificial Sequence
  Description of Artificial Sequence: Synthetic primer
tctacagctagatgcggcca

SEQ ID NO: 756 - DNA, 20 bp, Artificial Sequence
  Description of Artificial Sequence: Synthetic primer
tcgacagagtaacggagcca

SEQ ID NO: 757 - DNA, 53 bp, Artificial Sequence
  Description of Artificial Sequence: Synthetic primer
  Description of Combined DNA/RNA Molecule: Synthetic primer
tcgacagagtaacggagccacagtgttctgtttccttttgttgtggttgtcaa

SEQ ID NO: 758 - DNA, 38 bp, Artificial Sequence
  Description of Artificial Sequence: Synthetic primer
  Description of Combined DNA/RNA Molecule: Synthetic primer
acgacgacgacgaagagcacccagcaccccacaccctt

SEQ ID NO: 759 - DNA, 40 bp, Artificial Sequence
  Description of Artificial Sequence: Synthetic primer
  Description of Combined DNA/RNA Molecule: Synthetic primer
acgacgacgacgaagatcccagagcacccagcaccccacg

SEQ ID NO: 760 - DNA, 48 bp, Artificial Sequence
  Description of Artificial Sequence: Synthetic primer
  Description of Combined DNA/RNA Molecule: Synthetic primer
acgacgacgacttgacgaacataatgctgggtctcctgggccagcctc

SEQ ID NO: 761 - DNA, 46 bp, Artificial Sequence
  Description of Artificial Sequence: Synthetic oligonucleotide
  Description of Combined DNA/RNA Molecule: Synthetic oligonucleotide
ttgctgtgcgcggtagaacgctcactagctgctccttgacactgtc

SEQ ID NO: 762 - DNA, 53 bp, Artificial Sequence
  Description of Artificial Sequence: Synthetic oligonucleotide
ctgctttcagacttgttgcacctcaatctgggtgttacgctaagctggtgcca

SEQ ID NO: 763 - DNA, 30 bp, Artificial Sequence
  Description of Artificial Sequence: Synthetic probe
aacttgacactgctttcagacttgttgcac

SEQ ID NO: 764 - DNA, 19 bp, Artificial Sequence
  Description of Artificial Sequence: Synthetic primer
ttgctgtgcgcggtagaac

SEQ ID NO: 765 - DNA, 20 bp, Artificial Sequence
  Description of Artificial Sequence: Synthetic primer
tggcaccagcttagcgtaac

SEQ ID NO: 766 - DNA, 46 bp, Artificial Sequence
  Description of Artificial Sequence: Synthetic primer
  Description of Combined DNA/RNA Molecule: Synthetic primer
tggcaccagcttagcgtaaccagccttctgccccccagactgaggc

SEQ ID NO: 767 - DNA, 44 bp, Artificial Sequence
  Description of Artificial Sequence: Synthetic primer
  Description of Combined DNA/RNA Molecule: Synthetic primer
acgacgacgacgaacaagaggaggacaaacagacctccaggctc

SEQ ID NO: 768 - DNA, 44 bp, Artificial Sequence
  Description of Artificial Sequence: Synthetic primer
  Description of Combined DNA/RNA Molecule: Synthetic primer
acgacgacgacgaagtgcctcaagaggaggacaaacagacctct

SEQ ID NO: 769 - DNA, 49 bp, Artificial Sequence
  Description of Artificial Sequence: Synthetic primer
  Description of Combined DNA/RNA Molecule: Synthetic primer
acgacgacgacttgacgaacataatgcagctgcctgaggttggcuaatc

SEQ ID NO: 770 - DNA, 47 bp, Artificial Sequence
  Description of Artificial Sequence: Synthetic oligonucleotide
  Description of Combined DNA/RNA Molecule: Synthetic oligonucleotide
tcctgctctgaaaacctacaccccacagcctccttccccccagcatc

SEQ ID NO: 771 - DNA, 43 bp, Artificial Sequence
  Description of Artificial Sequence: Synthetic oligonucleotide
gcactccaccctgagcagggcggttacataggcggcttagaca

SEQ ID NO: 772 - DNA, 20 bp, Artificial Sequence
  Description of Artificial Sequence: Synthetic probe
aaccccccagcactccaccc

SEQ ID NO: 773 - DNA, 22 bp, Artificial Sequence
  Description of Artificial Sequence: Synthetic primer
tcctgctctgaaaacctacacc

SEQ ID NO: 774 - DNA, 22 bp, Artificial Sequence
  Description of Artificial Sequence: Synthetic primer
tgtctaagccgcctatgtaacc

SEQ ID NO: 775 - DNA, 55 bp, Artificial Sequence
  Description of Artificial Sequence: Synthetic primer
  Description of Combined DNA/RNA Molecule: Synthetic primer
tgtctaagccgcctatgtaaccgggttggctaatttctagttgttgccttgctcg

SEQ ID NO: 776 - DNA, 48 bp, Artificial Sequence
  Description of Artificial Sequence: Synthetic primer
  Description of Combined DNA/RNA Molecule: Synthetic primer
acgacgacgacgaacctcagggatgtagatctcaatgctctcagcacc

SEQ ID NO: 777 - DNA, 47 bp, Artificial Sequence
  Description of Artificial Sequence: Synthetic primer
  Description of Combined DNA/RNA Molecule: Synthetic primer
acgacgacgacgaatgcacctcagggatgtagatctcaatgcuctcg

SEQ ID NO: 778 - DNA, 49 bp, Artificial Sequence
  Description of Artificial Sequence: Synthetic primer
  Description of Combined DNA/RNA Molecule: Synthetic primer
acgacgacgacttgacgaacataatgcttgcagtgccaggaggcctcgg

SEQ ID NO: 779 - DNA, 48 bp, Artificial Sequence
  Description of Artificial Sequence: Synthetic oligonucleotide
  Description of Combined DNA/RNA Molecule: Synthetic oligonucleotide
tcccttagagagaacgcccactctcagtggccaagttctgacagacga

SEQ ID NO: 780 - DNA, 49 bp, Artificial Sequence
  Description of Artificial Sequence: Synthetic oligonucleotide
gacagacacagcacacttggcagccattggtgacgtacgagtgttctta

SEQ ID NO: 781 - DNA, 29 bp, Artificial Sequence
  Description of Artificial Sequence: Synthetic probe
aatctgacagacagacacagcacacttgg

SEQ ID NO: 782 - DNA, 20 bp, Artificial Sequence
  Description of Artificial Sequence: Synthetic primer
tcccttagagagaacgccca

SEQ ID NO: 783 - DNA, 22 bp, Artificial Sequence
  Description of Artificial Sequence: Synthetic primer
taagaacactcgtacgtcacca

SEQ ID NO: 784 - DNA, 49 bp, Artificial Sequence
  Description of Artificial Sequence: Synthetic primer
  Description of Combined DNA/RNA Molecule: Synthetic primer
taagaacactcgtacgtcaccaggcctgcaagtgcctgatggttgccag

SEQ ID NO: 785 - DNA, 25 bp, Artificial Sequence
  Description of Artificial Sequence: Synthetic primer
  Description of Combined DNA/RNA Molecule: Synthetic primer
acgacgacgacttgacgaacataac

SEQ ID NO: 786 - DNA, 42 bp, Artificial Sequence
  Description of Artificial Sequence: Synthetic primer
  Description of Combined DNA/RNA Molecule: Synthetic primer
acgacgacgacgaacaaattcaggctcctgaggcccaggaga

SEQ ID NO: 787 - DNA, 46 bp, Artificial Sequence
  Description of Artificial Sequence: Synthetic primer
  Description of Combined DNA/RNA Molecule: Synthetic primer
acgacgacgacgaacagaggtgtcatccaaattcaggctccuggaa

SEQ ID NO: 788 - DNA, 53 bp, Artificial Sequence
  Description of Artificial Sequence: Synthetic primer
  Description of Combined DNA/RNA Molecule: Synthetic primer
acgacgacgacttgacgaacataatggtgtgccttctgtgagtggtgacagag

SEQ ID NO: 789 - DNA, 51 bp, Artificial Sequence
  Description of Artificial Sequence: Synthetic oligonucleotide
  Description of Combined DNA/RNA Molecule: Synthetic oligonucleotide
tctcataccagacgcggtaacggtccaactctacagacccaggccactgca

SEQ ID NO: 790 - DNA, 54 bp, Artificial Sequence
  Description of Artificial Sequence: Synthetic oligonucleotide
ctgtggcccatcactttcaatttgacttggtttctgttcgtgtcgctgtgctta

SEQ ID NO: 791 - DNA, 22 bp, Artificial Sequence
  Description of Artificial Sequence: Synthetic probe
ttcaggccactgtggcccatca

SEQ ID NO: 792 - DNA, 21 bp, Artificial Sequence
  Description of Artificial Sequence: Synthetic primer
tctcataccagacgcggtaac

SEQ ID NO: 793 - DNA, 19 bp, Artificial Sequence
  Description of Artificial Sequence: Synthetic primer
taagcacagcgacacgaac

SEQ ID NO: 794 - DNA, 54 bp, Artificial Sequence
  Description of Artificial Sequence: Synthetic primer
  Description of Combined DNA/RNA Molecule: Synthetic primer
taagcacagcgacacgaactgtgagtggtgacagaaaccaagtcaaactgaaaa

SEQ ID NO: 795 - DNA, 40 bp, Artificial Sequence
  Description of Artificial Sequence: Synthetic primer
  Description of Combined DNA/RNA Molecule: Synthetic primer
acgacgacgacgaagctgcagagagcacagctgcaggcct

SEQ ID NO: 796 - DNA, 40 bp, Artificial Sequence
  Description of Artificial Sequence: Synthetic primer
  Description of Combined DNA/RNA Molecule: Synthetic primer
acgacgacgacgaacactgaggctgcagagagcacagcta

SEQ ID NO: 797 - DNA, 49 bp, Artificial Sequence
  Description of Artificial Sequence: Synthetic primer
  Description of Combined DNA/RNA Molecule: Synthetic primer
acgacgacgacttgacgaacataatgcagtgggcagccaagtgccccct

SEQ ID NO: 798 - DNA, 47 bp, Artificial Sequence
  Description of Artificial Sequence: Synthetic oligonucleotide
  Description of Combined DNA/RNA Molecule: Synthetic oligonucleotide
ttttcggcggcagctaaacgccaggcagtgattgacaggccaggagt

SEQ ID NO: 799 - DNA, 40 bp, Artificial Sequence
  Description of Artificial Sequence: Synthetic oligonucleotide
ggaacagggcctcccacccctgttcgtgtcgctgtgctta

SEQ ID NO: 800 - DNA, 22 bp, Artificial Sequence
  Description of Artificial Sequence: Synthetic probe
ttcaggccaggaacagggcctc

SEQ ID NO: 801 - DNA, 19 bp, Artificial Sequence
  Description of Artificial Sequence: Synthetic primer
ttttcggcggcagctaaac

SEQ ID NO: 802 - DNA, 19 bp, Artificial Sequence
  Description of Artificial Sequence: Synthetic primer
taagcacagcgacacgaac

SEQ ID NO: 803 - DNA, 43 bp, Artificial Sequence
  Description of Artificial Sequence: Synthetic primer
  Description of Combined DNA/RNA Molecule: Synthetic primer
taagcacagcgacacgaacaagtgccccccacccaggtggaga

SEQ ID NO: 804 - DNA, 47 bp, Artificial Sequence
  Description of Artificial Sequence: Synthetic primer
  Description of Combined DNA/RNA Molecule: Synthetic primer
acgacgacgacgaacctttccctcactcaattccttttcccacactt

SEQ ID NO: 805 - DNA, 44 bp, Artificial Sequence
  Description of Artificial Sequence: Synthetic primer
  Description of Combined DNA/RNA Molecule: Synthetic primer
acgacgacgacgaaccatccctttccctcactcaattccutttt

SEQ ID NO: 806 - DNA, 54 bp, Artificial Sequence
  Description of Artificial Sequence: Synthetic primer
  Description of Combined DNA/RNA Molecule: Synthetic primer
acgacgacgacttgacgaacataatgctcctgtcagagtaaggcattgcaaccc

SEQ ID NO: 807 - DNA, 44 bp, Artificial Sequence
  Description of Artificial Sequence: Synthetic oligonucleotide
  Description of Combined DNA/RNA Molecule: Synthetic oligonucleotide
tccggaccttcatcctccacactccatgcctcccccacaacttt

SEQ ID NO: 808 - DNA, 49 bp, Artificial Sequence
  Description of Artificial Sequence: Synthetic oligonucleotide
actcccagtgctgcagaagaactgaaggttgggcaggaacacgatagta

SEQ ID NO: 809 - DNA, 24 bp, Artificial Sequence
  Description of Artificial Sequence: Synthetic probe
aaccccacaactcccagtgctgca

SEQ ID NO: 810 - DNA, 19 bp, Artificial Sequence
  Description of Artificial Sequence: Synthetic primer
tccggaccttcatcctcca

SEQ ID NO: 811 - DNA, 20 bp, Artificial Sequence
  Description of Artificial Sequence: Synthetic primer
tactatcgtgttcctgccca

SEQ ID NO: 812 - DNA, 53 bp, Artificial Sequence
  Description of Artificial Sequence: Synthetic primer
  Description of Combined DNA/RNA Molecule: Synthetic primer
tactatcgtgttcctgcccagtaaggcattgcaaccttcagttcttttgcagt

SEQ ID NO: 813 - DNA, 41 bp, Artificial Sequence
  Description of Artificial Sequence: Synthetic primer
  Description of Combined DNA/RNA Molecule: Synthetic primer
acgacgacgacgaacacccagtccattcaagccccactgct

SEQ ID NO: 814 - DNA, 44 bp, Artificial Sequence
  Description of Artificial Sequence: Synthetic primer
  Description of Combined DNA/RNA Molecule: Synthetic primer
acgacgacgacgaacaaaacccacccagtccattcaagccccat

SEQ ID NO: 815 - DNA, 56 bp, Artificial Sequence
  Description of Artificial Sequence: Synthetic primer
  Description of Combined DNA/RNA Molecule: Synthetic primer
acgacgacgacttgacgaacataatcttcctttaacttcctccttggttcccccag

SEQ ID NO: 816 - DNA, 51 bp, Artificial Sequence
  Description of Artificial Sequence: Synthetic oligonucleotide
  Description of Combined DNA/RNA Molecule: Synthetic oligonucleotide
ttagccgccaaacgtaccacaccctctagggtcattcttgggagcaggcga

SEQ ID NO: 817 - DNA, 51 bp, Artificial Sequence
  Description of Artificial Sequence: Synthetic oligonucleotide
ggcagacctttcatcaacactttgcctgcaatgggcaggaacacgatagta

SEQ ID NO: 818 - DNA, 28 bp, Artificial Sequence
  Description of Artificial Sequence: Synthetic probe
aagggagcaggcagacctttcatcaaca

SEQ ID NO: 819 - DNA, 19 bp, Artificial Sequence
  Description of Artificial Sequence: Synthetic primer
ttagccgccaaacgtacca

SEQ ID NO: 820 - DNA, 20 bp, Artificial Sequence
  Description of Artificial Sequence: Synthetic primer
tactatcgtgttcctgccca

SEQ ID NO: 821 - DNA, 38 bp, Artificial Sequence
  Description of Artificial Sequence: Synthetic primer
  Description of Combined DNA/RNA Molecule: Synthetic primer
acgacgacgacgaaccaggcactcccaccagcaggcaa

SEQ ID NO: 822 - DNA, 38 bp, Artificial Sequence
  Description of Artificial Sequence: Synthetic primer
  Description of Combined DNA/RNA Molecule: Synthetic primer
acgacgacgacgaacacacagcagcccaggcacuccct

SEQ ID NO: 823 - DNA, 51 bp, Artificial Sequence
  Description of Artificial Sequence: Synthetic primer
  Description of Combined DNA/RNA Molecule: Synthetic primer
acgacgacgacttgacgaacataatccagcagctggaaggtgggaagctgc

SEQ ID NO: 824 - DNA, 45 bp, Artificial Sequence
  Description of Artificial Sequence: Synthetic oligonucleotide
  Description of Combined DNA/RNA Molecule: Synthetic oligonucleotide
tagcagctgaacaacccaactgtctcccacctgaggcccaccctt

SEQ ID NO: 825 - DNA, 41 bp, Artificial Sequence
  Description of Artificial Sequence: Synthetic oligonucleotide
cccccacctggtctgcagcacgttgtatggtcggcatgcta

SEQ ID NO: 826 - DNA, 18 bp, Artificial Sequence
  Description of Artificial Sequence: Synthetic probe
aagggcccacccccacct

SEQ ID NO: 827 - DNA, 20 bp, Artificial Sequence
  Description of Artificial Sequence: Synthetic primer
tagcagctgaacaacccaac

SEQ ID NO: 828 - DNA, 20 bp, Artificial Sequence
  Description of Artificial Sequence: Synthetic primer
tagcatgccgaccatacaac

SEQ ID NO: 829 - DNA, 47 bp, Artificial Sequence
  Description of Artificial Sequence: Synthetic primer
  Description of Combined DNA/RNA Molecule: Synthetic primer
tagcatgccgaccatacaacggtgggaagctgtcagctgaatgctgt

SEQ ID NO: 830 - DNA, 39 bp, Artificial Sequence
  Description of Artificial Sequence: Synthetic primer
  Description of Combined DNA/RNA Molecule: Synthetic primer
acgacgacgacgaaccacccaggtttccaccccaggccg

SEQ ID NO: 831 - DNA, 39 bp, Artificial Sequence
  Description of Artificial Sequence: Synthetic primer
  Description of Combined DNA/RNA Molecule: Synthetic primer
acgacgacgacgaaacccccacccaggtttccaccccaa

SEQ ID NO: 832 - DNA, 51 bp, Artificial Sequence
  Description of Artificial Sequence: Synthetic primer
  Description of Combined DNA/RNA Molecule: Synthetic primer
acgacgacgacttgacgaacataattgaggctggacagtcaggtgggctaa

SEQ ID NO: 833 - DNA, 51 bp, Artificial Sequence
  Description of Artificial Sequence: Synthetic oligonucleotide
  Description of Combined DNA/RNA Molecule: Synthetic oligonucleotide
tctgcccttcgcttcgaaccatcttccagccctgaagcagtaagcaccttg

SEQ ID NO: 834 - DNA, 50 bp, Artificial Sequence
  Description of Artificial Sequence: Synthetic oligonucleotide
cctcacctctagtggcaagtgcaaggaaccgttgtatggtcggcatgcta

SEQ ID NO: 835 - DNA, 29 bp, Artificial Sequence
  Description of Artificial Sequence: Synthetic probe
ttgtaagcacctcacctctagtggcaagt

SEQ ID NO: 836 - DNA, 19 bp, Artificial Sequence
  Description of Artificial Sequence: Synthetic primer
tctgcccttcgcttcgaac

SEQ ID NO: 837 - DNA, 20 bp, Artificial Sequence
  Description of Artificial Sequence: Synthetic primer
tagcatgccgaccatacaac

SEQ ID NO: 838 - DNA, 46 bp, Artificial Sequence
  Description of Artificial Sequence: Synthetic primer
  Description of Combined DNA/RNA Molecule: Synthetic primer
tagcatgccgaccatacaaccagtcaggtgggctagggtatggttt

SEQ ID NO: 839 - DNA, 38 bp, Artificial Sequence
  Description of Artificial Sequence: Synthetic primer
  Description of Combined DNA/RNA Molecule: Synthetic primer
acgacgacgacgaatcctctcccctccctcccagcttt

SEQ ID NO: 840 - DNA, 51 bp, Artificial Sequence
  Description of Artificial Sequence: Synthetic primer
  Description of Combined DNA/RNA Molecule: Synthetic primer
acgacgacgacttgacgaacataatctctgtgtgtgctgggaggccccccg

SEQ ID NO: 841 - DNA, 50 bp, Artificial Sequence
  Description of Artificial Sequence: Synthetic oligonucleotide
  Description of Combined DNA/RNA Molecule: Synthetic oligonucleotide
ttgcaaaccacccggacaacagaggaagcaacagatcatcacccagtgcc

SEQ ID NO: 842 - DNA, 58 bp, Artificial Sequence
  Description of Artificial Sequence: Synthetic oligonucleotide
gtgttctcaccaaaagcacataatcaccagtgtaactcttggtcagcatcgactccta

SEQ ID NO: 843 - DNA, 31 bp, Artificial Sequence
  Description of Artificial Sequence: Synthetic probe
tttcacccagtgttctcaccaaaagcacata

SEQ ID NO: 844 - DNA, 19 bp, Artificial Sequence
  Description of Artificial Sequence: Synthetic primer
ttgcaaaccacccggacaa

SEQ ID NO: 845 - DNA, 20 bp, Artificial Sequence
  Description of Artificial Sequence: Synthetic primer
taggagtcgatgctgaccaa

SEQ ID NO: 846 - DNA, 50 bp, Artificial Sequence
  Description of Artificial Sequence: Synthetic primer
  Description of Combined DNA/RNA Molecule: Synthetic primer
taggagtcgatgctgaccaacccagccaacatgagttacactgatgattg

SEQ ID NO: 847 - DNA, 38 bp, Artificial Sequence
  Description of Artificial Sequence: Synthetic primer
  Description of Combined DNA/RNA Molecule: Synthetic primer
acgacgacgacgaaccagcatcaccacctgccagggaa

SEQ ID NO: 848 - DNA, 39 bp, Artificial Sequence
  Description of Artificial Sequence: Synthetic primer
  Description of Combined DNA/RNA Molecule: Synthetic primer
acgacgacgacgaagaagtcagggtgctcagccagcatt

SEQ ID NO: 849 - DNA, 51 bp, Artificial Sequence
  Description of Artificial Sequence: Synthetic primer
  Description of Combined DNA/RNA Molecule: Synthetic primer
acgacgacgacttgacgaacataatggacttgttcctgctgggtgcugata

SEQ ID NO: 850 - DNA, 40 bp, Artificial Sequence
  Description of Artificial Sequence: Synthetic oligonucleotide
  Description of Combined DNA/RNA Molecule: Synthetic oligonucleotide
ttgcaaaccacccggacaacccagggtccccaacacatga

SEQ ID NO: 851 - DNA, 50 bp, Artificial Sequence
  Description of Artificial Sequence: Synthetic oligonucleotide
catagcagccaacactcagctcatccacagttggtcagcatcgactccta

SEQ ID NO: 852 - DNA, 28 bp, Artificial Sequence
  Description of Artificial Sequence: Synthetic probe
aacccaacacatagcagccaacactcag

SEQ ID NO: 853 - DNA, 19 bp, Artificial Sequence
  Description of Artificial Sequence: Synthetic primer
ttgcaaaccacccggacaa

SEQ ID NO: 854 - DNA, 20 bp, Artificial Sequence
  Description of Artificial Sequence: Synthetic primer
taggagtcgatgctgaccaa

SEQ ID NO: 855 - DNA, 45 bp, Artificial Sequence
  Description of Artificial Sequence: Synthetic primer
  Description of Combined DNA/RNA Molecule: Synthetic primer
taggagtcgatgctgaccaactgctgggtgctgatgctatggata

SEQ ID NO: 856 - DNA, 41 bp, Artificial Sequence
  Description of Artificial Sequence: Synthetic primer
  Description of Combined DNA/RNA Molecule: Synthetic primer
acgacgacgacgaaccagtgaagcacagcatgcacaugcac

SEQ ID NO: 857 - DNA, 41 bp, Artificial Sequence
  Description of Artificial Sequence: Synthetic primer
  Description of Combined DNA/RNA Molecule: Synthetic primer
acgacgacgacgaagtccagtgaagcacagcatgcacatgt

SEQ ID NO: 858 - DNA, 48 bp, Artificial Sequence
  Description of Artificial Sequence: Synthetic primer
  Description of Combined DNA/RNA Molecule: Synthetic primer
acgacgacgacttgacgaacataataccagtgagggacccctcccccg

SEQ ID NO: 859 - DNA, 48 bp, Artificial Sequence
  Description of Artificial Sequence: Synthetic oligonucleotide
  Description of Combined DNA/RNA Molecule: Synthetic oligonucleotide
taagacgtatgctagcgccaaccagtgtttgcacaagggaacaggtac

SEQ ID NO: 860 - DNA, 49 bp, Artificial Sequence
  Description of Artificial Sequence: Synthetic oligonucleotide
ggtgtgtgagtgcagctctcccaagtgtgttggtcagcatcgactccta

SEQ ID NO: 861 - DNA, 25 bp, Artificial Sequence
  Description of Artificial Sequence: Synthetic probe
ttgggaacaggtgtgtgagtgcagc

SEQ ID NO: 862 - DNA, 21 bp, Artificial Sequence
  Description of Artificial Sequence: Synthetic primer
taagacgtatgctagcgccaa

SEQ ID NO: 863 - DNA, 20 bp, Artificial Sequence
  Description of Artificial Sequence: Synthetic primer
taggagtcgatgctgaccaa

SEQ ID NO: 864 - DNA, 51 bp, Artificial Sequence
  Description of Artificial Sequence: Synthetic primer
  Description of Combined DNA/RNA Molecule: Synthetic primer
taggagtcgatgctgaccaacctccccatattaacccatgtggtatgcaac

SEQ ID NO: 865 - DNA, 36 bp, Artificial Sequence
  Description of Artificial Sequence: Synthetic primer
  Description of Combined DNA/RNA Molecule: Synthetic primer
acgacgacgacgaaggaggctgcagcctgcaaactg

SEQ ID NO: 866 - DNA, 41 bp, Artificial Sequence
  Description of Artificial Sequence: Synthetic primer
  Description of Combined DNA/RNA Molecule: Synthetic primer
acgacgacgacgaaccacacaaccaatggtggaggcugcaa

SEQ ID NO: 867 - DNA, 55 bp, Artificial Sequence
  Description of Artificial Sequence: Synthetic primer
  Description of Combined DNA/RNA Molecule: Synthetic primer
acgacgacgacttgacgaacataatgacattttgaggtgtcctgcactcccacct

SEQ ID NO: 868 - DNA, 46 bp, Artificial Sequence
  Description of Artificial Sequence: Synthetic oligonucleotide
  Description of Combined DNA/RNA Molecule: Synthetic oligonucleotide
tacatgccatcccacgacactagtcagtggctcaggcatcagcaaa

SEQ ID NO: 869 - DNA, 42 bp, Artificial Sequence
  Description of Artificial Sequence: Synthetic oligonucleotide
gcagggagctgctcagcagcagatgtgtcggagcggttacta

SEQ ID NO: 870 - DNA, 25 bp, Artificial Sequence
  Description of Artificial Sequence: Synthetic probe
ttggcatcagcagggagctgctcag

SEQ ID NO: 871 - DNA, 19 bp, Artificial Sequence
  Description of Artificial Sequence: Synthetic primer
tacatgccatcccacgaca

SEQ ID NO: 872 - DNA, 19 bp, Artificial Sequence
  Description of Artificial Sequence: Synthetic primer
tagtaaccgctccgacaca

SEQ ID NO: 873 - DNA, 49 bp, Artificial Sequence
  Description of Artificial Sequence: Synthetic primer
  Description of Combined DNA/RNA Molecule: Synthetic primer
tagtaaccgctccgacacacccacccaacattacactgtctgttgctgg

SEQ ID NO: 874 - DNA, 44 bp, Artificial Sequence
  Description of Artificial Sequence: Synthetic primer
  Description of Combined DNA/RNA Molecule: Synthetic primer
acgacgacgacgaacaatcactctccctagcctgacccagtgag

SEQ ID NO: 875 - DNA, 60 bp, Artificial Sequence
  Description of Artificial Sequence: Synthetic primer
  Description of Combined DNA/RNA Molecule: Synthetic primer
acgacgacgacttgacgaacataattggaagtcctccttgctttatttaaaagaagaagg

SEQ ID NO: 876 - DNA, 54 bp, Artificial Sequence
  Description of Artificial Sequence: Synthetic oligonucleotide
  Description of Combined DNA/RNA Molecule: Synthetic oligonucleotide
tccaaacaagctgatccgtacataacatattcatgcactgagcacatcaagcga

SEQ ID NO: 877 - DNA, 52 bp, Artificial Sequence
  Description of Artificial Sequence: Synthetic oligonucleotide
agcagcccagcacagaacttttttttttttctttgtgtcggagcggttacta

SEQ ID NO: 878 - DNA, 31 bp, Artificial Sequence
  Description of Artificial Sequence: Synthetic probe
ttcacatcaagcagcccagcacagaactttt

SEQ ID NO: 879 - DNA, 22 bp, Artificial Sequence
  Description of Artificial Sequence: Synthetic primer
tccaaacaagctgatccgtaca

SEQ ID NO: 880 - DNA, 19 bp, Artificial Sequence
  Description of Artificial Sequence: Synthetic primer
tagtaaccgctccgacaca

SEQ ID NO: 881 - DNA, 43 bp, Artificial Sequence
  Description of Artificial Sequence: Synthetic primer
  Description of Combined DNA/RNA Molecule: Synthetic primer
acgacgacgacgaagcacttgtgtgtgaatgtgtcccaggaga

SEQ ID NO: 882 - DNA, 41 bp, Artificial Sequence
  Description of Artificial Sequence: Synthetic primer
  Description of Combined DNA/RNA Molecule: Synthetic primer
acgacgacgacgaaggcagctgcacttgtgtgtgaaugtgc

SEQ ID NO: 883 - DNA, 51 bp, Artificial Sequence
  Description of Artificial Sequence: Synthetic primer
  Description of Combined DNA/RNA Molecule: Synthetic primer
acgacgacgacttgacgaacataatctttggtgtctggcctggtgcutgta

SEQ ID NO: 884 - DNA, 47 bp, Artificial Sequence
  Description of Artificial Sequence: Synthetic oligonucleotide
  Description of Combined DNA/RNA Molecule: Synthetic oligonucleotide
tagggcgacagttaccacaagaccagacacctcaatccctcagcctt

SEQ ID NO: 885 - DNA, 42 bp, Artificial Sequence
  Description of Artificial Sequence: Synthetic oligonucleotide
gcccccaacacaggcacctgtcttgtgggtctcgctcgtata

SEQ ID NO: 886 - DNA, 22 bp, Artificial Sequence
  Description of Artificial Sequence: Synthetic probe
tttccctcagcccccaacacag

SEQ ID NO: 887 - DNA, 20 bp, Artificial Sequence
  Description of Artificial Sequence: Synthetic primer
tagggcgacagttaccacaa

SEQ ID NO: 888 - DNA, 20 bp, Artificial Sequence
  Description of Artificial Sequence: Synthetic primer
tatacgagcgagacccacaa

SEQ ID NO: 889 - DNA, 46 bp, Artificial Sequence
  Description of Artificial Sequence: Synthetic primer
  Description of Combined DNA/RNA Molecule: Synthetic primer
tatacgagcgagacccacaagcctggtgcttgtggacagatgccta

SEQ ID NO: 890 - DNA, 50 bp, Artificial Sequence
  Description of Artificial Sequence: Synthetic primer
  Description of Combined DNA/RNA Molecule: Synthetic primer
acgacgacgacgaattgtcattcacatgcatcactttccttcatcutggt

SEQ ID NO: 891 - DNA, 62 bp, Artificial Sequence
  Description of Artificial Sequence: Synthetic primer
  Description of Combined DNA/RNA Molecule: Synthetic primer
acgacgacgacttgacgaacataattttgagacactgctctagtatggtcctagtgaaagac

SEQ ID NO: 892 - DNA, 61 bp, Artificial Sequence
  Description of Artificial Sequence: Synthetic oligonucleotide
  Description of Combined DNA/RNA Molecule: Synthetic oligonucleotide
tccgactttagtgcgtcacaagctatacttcctctcatctgcagtgttttattccacacgg

SEQ ID NO: 893 - DNA, 54 bp, Artificial Sequence
  Description of Artificial Sequence: Synthetic oligonucleotide
cacaagatgcactgacagaggccatttcaaacaattgtgggtctcgctcgtata

SEQ ID NO: 894 - DNA, 31 bp, Artificial Sequence
  Description of Artificial Sequence: Synthetic probe
aatattccacacaagatgcactgacagaggc

SEQ ID NO: 895 - DNA, 21 bp, Artificial Sequence
  Description of Artificial Sequence: Synthetic primer
tccgactttagtgcgtcacaa

SEQ ID NO: 896 - DNA, 20 bp, Artificial Sequence
  Description of Artificial Sequence: Synthetic primer
tatacgagcgagacccacaa

SEQ ID NO: 897 - DNA, 61 bp, Artificial Sequence
  Description of Artificial Sequence: Synthetic primer
  Description of Combined DNA/RNA Molecule: Synthetic primer
tatacgagcgagacccacaacactgctctagtatggtcctagtgaaagataaatttgttta

SEQ ID NO: 898 - DNA, 47 bp, Artificial Sequence
  Description of Artificial Sequence: Synthetic primer
  Description of Combined DNA/RNA Molecule: Synthetic primer
acgacgacgacgaacaggatgcaaatacaaaacagcaacacaggaag

SEQ ID NO: 899 - DNA, 45 bp, Artificial Sequence
  Description of Artificial Sequence: Synthetic primer
  Description of Combined DNA/RNA Molecule: Synthetic primer
acgacgacgacgaagccacagcaggatgcaaatacaaaacagcag

SEQ ID NO: 900 - DNA, 50 bp, Artificial Sequence
  Description of Artificial Sequence: Synthetic primer
  Description of Combined DNA/RNA Molecule: Synthetic primer
acgacgacgacttgacgaacataatggtgaggcaaggtcctgagagagta

SEQ ID NO: 901 - DNA, 56 bp, Artificial Sequence
  Description of Artificial Sequence: Synthetic oligonucleotide
  Description of Combined DNA/RNA Molecule: Synthetic oligonucleotide
tcaaacaaaggcgaccacaaccaatttgtcacaaagggagaggtgtaagcacagtg

SEQ ID NO: 902 - DNA, 55 bp, Artificial Sequence
  Description of Artificial Sequence: Synthetic oligonucleotide
cagcacaaaggaattgcttgcccaatctaccaggttgtcgcataggcagttcata

SEQ ID NO: 903 - DNA, 31 bp, Artificial Sequence
  Description of Artificial Sequence: Synthetic probe
aagtaagcacagcacaaaggaattgcttgcc

SEQ ID NO: 904 - DNA, 21 bp, Artificial Sequence
  Description of Artificial Sequence: Synthetic primer
tcaaacaaaggcgaccacaac

SEQ ID NO: 905 - DNA, 22 bp, Artificial Sequence
  Description of Artificial Sequence: Synthetic primer
tatgaactgcctatgcgacaac

SEQ ID NO: 906 - DNA, 44 bp, Artificial Sequence
  Description of Artificial Sequence: Synthetic primer
  Description of Combined DNA/RNA Molecule: Synthetic primer
acgacgacgacgaagacacaggaaattagccaggttgcaagtta

SEQ ID NO: 907 - DNA, 44 bp, Artificial Sequence
  Description of Artificial Sequence: Synthetic primer
  Description of Combined DNA/RNA Molecule: Synthetic primer
acgacgacgacgaatgccagaggacacaggaaattagccaggtc

SEQ ID NO: 908 - DNA, 49 bp, Artificial Sequence
  Description of Artificial Sequence: Synthetic primer
  Description of Combined DNA/RNA Molecule: Synthetic primer
acgacgacgacttgacgaacataattgaagggaagccctggccaggccg

SEQ ID NO: 909 - DNA, 49 bp, Artificial Sequence
  Description of Artificial Sequence: Synthetic oligonucleotide
  Description of Combined DNA/RNA Molecule: Synthetic oligonucleotide
taaacaatgagacccgctgaacccacagcaccaggaacagaacacactt

SEQ ID NO: 910 - DNA, 47 bp, Artificial Sequence
  Description of Artificial Sequence: Synthetic oligonucleotide
cacccaatctccagcaggagccaccgttgtcgcataggcagttcata

SEQ ID NO: 911 - DNA, 29 bp, Artificial Sequence
  Description of Artificial Sequence: Synthetic probe
ttcagaacacacccaatctccagcaggag

SEQ ID NO: 912 - DNA, 22 bp, Artificial Sequence
  Description of Artificial Sequence: Synthetic primer
taaacaatgagacccgctgaac

SEQ ID NO: 913 - DNA, 22 bp, Artificial Sequence
  Description of Artificial Sequence: Synthetic primer
tatgaactgcctatgcgacaac

SEQ ID NO: 914 - DNA, 44 bp, Artificial Sequence
  Description of Artificial Sequence: Synthetic primer
  Description of Combined DNA/RNA Molecule: Synthetic primer
tatgaactgcctatgcgacaacgccaggccaggcctgatggctt

SEQ ID NO: 915 - DNA, 37 bp, Artificial Sequence
  Description of Artificial Sequence: Synthetic primer
  Description of Combined DNA/RNA Molecule: Synthetic primer
acgacgacgacgaacagcagcagagcagggcactggc

SEQ ID NO: 916 - DNA, 41 bp, Artificial Sequence
  Description of Artificial Sequence: Synthetic primer
  Description of Combined DNA/RNA Molecule: Synthetic primer
acgacgacgacgaactctcttccctgcagcagcagagcaga

SEQ ID NO: 917 - DNA, 50 bp, Artificial Sequence
  Description of Artificial Sequence: Synthetic primer
  Description of Combined DNA/RNA Molecule: Synthetic primer
acgacgacgacttgacgaacataatgcttggtgtggctcatggcagccaa

SEQ ID NO: 918 - DNA, 42 bp, Artificial Sequence
  Description of Artificial Sequence: Synthetic oligonucleotide
  Description of Combined DNA/RNA Molecule: Synthetic oligonucleotide
tctgccagaacaccgacacgccagcagcaggcatacagcatg

SEQ ID NO: 919 - DNA, 44 bp, Artificial Sequence
  Description of Artificial Sequence: Synthetic oligonucleotide
gcacatcagccaccagcacttcctggtgtgttggcgtacggtga

SEQ ID NO: 920 - DNA, 28 bp, Artificial Sequence
  Description of Artificial Sequence: Synthetic probe
ttgcatacagcacatcagccaccagcac

SEQ ID NO: 921 - DNA, 19 bp, Artificial Sequence
  Description of Artificial Sequence: Synthetic primer
tctgccagaacaccgacac

SEQ ID NO: 922 - DNA, 19 bp, Artificial Sequence
  Description of Artificial Sequence: Synthetic primer
tcaccgtacgccaacacac

SEQ ID NO: 923 - DNA, 44 bp, Artificial Sequence
  Description of Artificial Sequence: Synthetic primer
  Description of Combined DNA/RNA Molecule: Synthetic primer
tcaccgtacgccaacacactgtggctcatggcagccaatgggag

SEQ ID NO: 924 - DNA, 41 bp, Artificial Sequence
  Description of Artificial Sequence: Synthetic primer
  Description of Combined DNA/RNA Molecule: Synthetic primer
acgacgacgacgaagccaccactctgtctctccacaccccg

SEQ ID NO: 925 - DNA, 42 bp, Artificial Sequence
  Description of Artificial Sequence: Synthetic primer
  Description of Combined DNA/RNA Molecule: Synthetic primer
acgacgacgacgaatctacatggccaccactctgtctctccg

SEQ ID NO: 926 - DNA, 49 bp, Artificial Sequence
  Description of Artificial Sequence: Synthetic primer
  Description of Combined DNA/RNA Molecule: Synthetic primer
acgacgacgacttgacgaacataatagcctgggtgaagctgccagggaa

SEQ ID NO: 927 - DNA, 44 bp, Artificial Sequence
  Description of Artificial Sequence: Synthetic oligonucleotide
  Description of Combined DNA/RNA Molecule: Synthetic oligonucleotide
tccggatcaaagcagccacctcagccagcccagagcccacccgt

SEQ ID NO: 928 - DNA, 41 bp, Artificial Sequence
  Description of Artificial Sequence: Synthetic oligonucleotide
cccacacagacccccaccctgcgtgtgttggcgtacggtga

SEQ ID NO: 929 - DNA, 23 bp, Artificial Sequence
  Description of Artificial Sequence: Synthetic probe
ttgagcccacccacacagacccc

SEQ ID NO: 930 - DNA, 19 bp, Artificial Sequence
  Description of Artificial Sequence: Synthetic primer
tccggatcaaagcagccac

SEQ ID NO: 931 - DNA, 19 bp, Artificial Sequence
  Description of Artificial Sequence: Synthetic primer
tcaccgtacgccaacacac

SEQ ID NO: 932 - DNA, 41 bp, Artificial Sequence
  Description of Artificial Sequence: Synthetic primer
  Description of Combined DNA/RNA Molecule: Synthetic primer
tcaccgtacgccaacacacctgagctgaggcaggatgggag

SEQ ID NO: 933 - DNA, 43 bp, Artificial Sequence
  Description of Artificial Sequence: Synthetic primer
  Description of Combined DNA/RNA Molecule: Synthetic primer
acgacgacgacgaagtcaccagtgctcttccatcctcaccccc

SEQ ID NO: 934 - DNA, 46 bp, Artificial Sequence
  Description of Artificial Sequence: Synthetic primer
  Description of Combined DNA/RNA Molecule: Synthetic primer
acgacgacgacgaaggaaaagtcaccagtgctcttccatccucact

SEQ ID NO: 935 - DNA, 56 bp, Artificial Sequence
  Description of Artificial Sequence: Synthetic primer
  Description of Combined DNA/RNA Molecule: Synthetic primer
acgacgacgacttgacgaacataatctcccagtcctttcaagtttgtgcaagggaa

SEQ ID NO: 936 - DNA, 45 bp, Artificial Sequence
  Description of Artificial Sequence: Synthetic oligonucleotide
  Description of Combined DNA/RNA Molecule: Synthetic oligonucleotide
ttctagataccacggacgcaccaggatgtgcaggccaacaggctc

SEQ ID NO: 937 - DNA, 47 bp, Artificial Sequence
  Description of Artificial Sequence: Synthetic oligonucleotide
ggcctgtgatcccagaacacttcctgcgtgttggtgtgcaaagctga

SEQ ID NO: 938 - DNA, 24 bp, Artificial Sequence
  Description of Artificial Sequence: Synthetic probe
ttgccaacaggcctgtgatcccag

SEQ ID NO: 939 - DNA, 21 bp, Artificial Sequence
  Description of Artificial Sequence: Synthetic primer
ttctagataccacggacgcac

SEQ ID NO: 940 - DNA, 20 bp, Artificial Sequence
  Description of Artificial Sequence: Synthetic primer
tcagctttgcacaccaacac

SEQ ID NO: 941 - DNA, 46 bp, Artificial Sequence
  Description of Artificial Sequence: Synthetic primer
  Description of Combined DNA/RNA Molecule: Synthetic primer
tcagctttgcacaccaacactgcaagaggatggcaggaaatgttcc

SEQ ID NO: 942 - DNA, 36 bp, Artificial Sequence
  Description of Artificial Sequence: Synthetic primer
  Description of Combined DNA/RNA Molecule: Synthetic primer
acgacgacgacgaactgcaccagggcccacacagcg

SEQ ID NO: 943 - DNA, 38 bp, Artificial Sequence
  Description of Artificial Sequence: Synthetic primer
  Description of Combined DNA/RNA Molecule: Synthetic primer
acgacgacgacgaagcacaagctgcaccagggcccacg

SEQ ID NO: 944 - DNA, 49 bp, Artificial Sequence
  Description of Artificial Sequence: Synthetic primer
  Description of Combined DNA/RNA Molecule: Synthetic primer
acgacgacgacttgacgaacataatcaggaggcaggagtgggtcuggct

SEQ ID NO: 945 - DNA, 41 bp, Artificial Sequence
  Description of Artificial Sequence: Synthetic oligonucleotide
  Description of Combined DNA/RNA Molecule: Synthetic oligonucleotide
tatgcggaccgatgactcaacagaggcagccagacagggtc

SEQ ID NO: 946 - DNA, 48 bp, Artificial Sequence
  Description of Artificial Sequence: Synthetic oligonucleotide
gggcttactgtgcagcacatgccaacttgcttggcttgatctacctga

SEQ ID NO: 947 - DNA, 26 bp, Artificial Sequence
  Description of Artificial Sequence: Synthetic probe
ttccagacagggcttactgtgcagca

SEQ ID NO: 948 - DNA, 20 bp, Artificial Sequence
  Description of Artificial Sequence: Synthetic primer
tatgcggaccgatgactcaa

SEQ ID NO: 949 - DNA, 22 bp, Artificial Sequence
  Description of Artificial Sequence: Synthetic primer
tcaggtagatcaagccaagcaa

SEQ ID NO: 950 - DNA, 44 bp, Artificial Sequence
  Description of Artificial Sequence: Synthetic primer
  Description of Combined DNA/RNA Molecule: Synthetic primer
tcaggtagatcaagccaagcaaggcccagaggttggcgtgtgcc

SEQ ID NO: 951 - DNA, 39 bp, Artificial Sequence
  Description of Artificial Sequence: Synthetic primer
  Description of Combined DNA/RNA Molecule: Synthetic primer
acgacgacgacgaatgctccacaccacagagccaggccc

SEQ ID NO: 952 - DNA, 40 bp, Artificial Sequence
  Description of Artificial Sequence: Synthetic primer
  Description of Combined DNA/RNA Molecule: Synthetic primer
acgacgacgacgaaacacctgctccacaccacagagccaa

SEQ ID NO: 953 - DNA, 57 bp, Artificial Sequence
  Description of Artificial Sequence: Synthetic primer
  Description of Combined DNA/RNA Molecule: Synthetic primer
acgacgacgacttgacgaacataatctgcagacccatcttcatcacctttgagggct

SEQ ID NO: 954 - DNA, 42 bp, Artificial Sequence
  Description of Artificial Sequence: Synthetic oligonucleotide
  Description of Combined DNA/RNA Molecule: Synthetic oligonucleotide
ttcgtgggcacacaagcaagtgctggcacagcagacagagtg

SEQ ID NO: 955 - DNA, 47 bp, Artificial Sequence
  Description of Artificial Sequence: Synthetic oligonucleotide
gagcaccaggtgcacagggtcacacttgcttggcttgatctacctga

SEQ ID NO: 956 - DNA, 24 bp, Artificial Sequence
  Description of Artificial Sequence: Synthetic probe
ttgcagacagagcaccaggtgcac

SEQ ID NO: 957 - DNA, 19 bp, Artificial Sequence
  Description of Artificial Sequence: Synthetic primer
ttcgtgggcacacaagcaa

SEQ ID NO: 958 - DNA, 22 bp, Artificial Sequence
  Description of Artificial Sequence: Synthetic primer
tcaggtagatcaagccaagcaa

SEQ ID NO: 959 - DNA, 48 bp, Artificial Sequence
  Description of Artificial Sequence: Synthetic primer
  Description of Combined DNA/RNA Molecule: Synthetic primer
tcaggtagatcaagccaagcaatcacctttgagggccagagatgtgat

SEQ ID NO: 960 - DNA, 40 bp, Artificial Sequence
  Description of Artificial Sequence: Synthetic primer
  Description of Combined DNA/RNA Molecule: Synthetic primer
acgacgacgacgaacacattggcacactccagccaggtgt

SEQ ID NO: 961 - DNA, 41 bp, Artificial Sequence
  Description of Artificial Sequence: Synthetic primer
  Description of Combined DNA/RNA Molecule: Synthetic primer
acgacgacgacgaagcacagcacattggcacactccagccg

SEQ ID NO: 962 - DNA, 49 bp, Artificial Sequence
  Description of Artificial Sequence: Synthetic primer
  Description of Combined DNA/RNA Molecule: Synthetic primer
acgacgacgacttgacgaacataatactgggccatgttgagggagccta

SEQ ID NO: 963 - DNA, 45 bp, Artificial Sequence
  Description of Artificial Sequence: Synthetic oligonucleotide
  Description of Combined DNA/RNA Molecule: Synthetic oligonucleotide
ttgaaggaggaaatcggcacatgcagcccttcccagcgcacccga

SEQ ID NO: 964 - DNA, 44 bp, Artificial Sequence
  Description of Artificial Sequence: Synthetic oligonucleotide
cccagcaggtgccagctcccactgtcgaaccgttttaggactga

SEQ ID NO: 965 - DNA, 21 bp, Artificial Sequence
  Description of Artificial Sequence: Synthetic probe
ttcagcacacccagcaggtgc

SEQ ID NO: 966 - DNA, 21 bp, Artificial Sequence
  Description of Artificial Sequence: Synthetic primer
ttgaaggaggaaatcggcaca

SEQ ID NO: 967 - DNA, 22 bp, Artificial Sequence
  Description of Artificial Sequence: Synthetic primer
tcagtcctaaaacggttcgaca

SEQ ID NO: 968 - DNA, 50 bp, Artificial Sequence
  Description of Artificial Sequence: Synthetic primer
  Description of Combined DNA/RNA Molecule: Synthetic primer
tcagtcctaaaacggttcgacaggagcctgagctcattgagctatgggaa

SEQ ID NO: 969 - DNA, 42 bp, Artificial Sequence
  Description of Artificial Sequence: Synthetic primer
  Description of Combined DNA/RNA Molecule: Synthetic primer
acgacgacgacgaatcagcctcaccaacatctgctcautctt

SEQ ID NO: 970 - DNA, 42 bp, Artificial Sequence
  Description of Artificial Sequence: Synthetic primer
  Description of Combined DNA/RNA Molecule: Synthetic primer
acgacgacgacgaacctgcttcagcctcaccaacatcugctt

SEQ ID NO: 971 - DNA, 50 bp, Artificial Sequence
  Description of Artificial Sequence: Synthetic primer
  Description of Combined DNA/RNA Molecule: Synthetic primer
acgacgacgacttgacgaacataatggtggcctgcagttgttggtgtggc

SEQ ID NO: 972 - DNA, 50 bp, Artificial Sequence
  Description of Artificial Sequence: Synthetic oligonucleotide
  Description of Combined DNA/RNA Molecule: Synthetic oligonucleotide
ttcggcaggctacggtacacactcttgagcatctccaactgcgcaaagac

SEQ ID NO: 973 - DNA, 48 bp, Artificial Sequence
  Description of Artificial Sequence: Synthetic oligonucleotide
aaggtgtcaccctgggccaggaaccatgtcgaaccgttttaggactga

SEQ ID NO: 974 - DNA, 24 bp, Artificial Sequence
  Description of Artificial Sequence: Synthetic probe
ttctgcgcaaaggtgtcaccctgg

SEQ ID NO: 975 - DNA, 19 bp, Artificial Sequence
  Description of Artificial Sequence: Synthetic primer
ttcggcaggctacggtaca

SEQ ID NO: 976 - DNA, 22 bp, Artificial Sequence
  Description of Artificial Sequence: Synthetic primer
tcagtcctaaaacggttcgaca

SEQ ID NO: 977 - DNA, 48 bp, Artificial Sequence
  Description of Artificial Sequence: Synthetic primer
  Description of Combined DNA/RNA Molecule: Synthetic primer
tcagtcctaaaacggttcgacagcctgcagttgttggtgtgatggttt

SEQ ID NO: 978 - DNA, 38 bp, Artificial Sequence
  Description of Artificial Sequence: Synthetic primer
  Description of Combined DNA/RNA Molecule: Synthetic primer
acgacgacgacgaaggaggcacaggcacaagcaugtgc

SEQ ID NO: 979 - DNA, 40 bp, Artificial Sequence
  Description of Artificial Sequence: Synthetic primer
  Description of Combined DNA/RNA Molecule: Synthetic primer
acgacgacgacgaagacaaggaggcacaggcacaagcata

SEQ ID NO: 980 - DNA, 49 bp, Artificial Sequence
  Description of Artificial Sequence: Synthetic primer
  Description of Combined DNA/RNA Molecule: Synthetic primer
acgacgacgacttgacgaacataatgccctgtggtgggtgtgaccctga

SEQ ID NO: 981 - DNA, 48 bp, Artificial Sequence
  Description of Artificial Sequence: Synthetic oligonucleotide
  Description of Combined DNA/RNA Molecule: Synthetic oligonucleotide
tctcgacgatgaaaagcaacatgtctgtgctaggagagcaacagaagg

SEQ ID NO: 982 - DNA, 47 bp, Artificial Sequence
  Description of Artificial Sequence: Synthetic oligonucleotide
gaaaacccagcatggagcacctgcagtctgtgggtactgtccgtgga

SEQ ID NO: 983 - DNA, 27 bp, Artificial Sequence
  Description of Artificial Sequence: Synthetic probe
ttagcaacagaaaacccagcatggagc

SEQ ID NO: 984 - DNA, 21 bp, Artificial Sequence
  Description of Artificial Sequence: Synthetic primer
tctcgacgatgaaaagcaaca

SEQ ID NO: 985 - DNA, 19 bp, Artificial Sequence
  Description of Artificial Sequence: Synthetic primer
tccacggacagtacccaca

SEQ ID NO: 986 - DNA, 44 bp, Artificial Sequence
  Description of Artificial Sequence: Synthetic primer
  Description of Combined DNA/RNA Molecule: Synthetic primer
tccacggacagtacccacatgggtgtgaccctggatgatggacc

SEQ ID NO: 987 - DNA, 36 bp, Artificial Sequence
  Description of Artificial Sequence: Synthetic primer
  Description of Combined DNA/RNA Molecule: Synthetic primer
acgacgacgacgaaggcacagctggagggcaagcta

SEQ ID NO: 988 - DNA, 55 bp, Artificial Sequence
  Description of Artificial Sequence: Synthetic primer
  Description of Combined DNA/RNA Molecule: Synthetic primer
acgacgacgacttgacgaacataattgattaccagcccagacctcccttgcttgt

SEQ ID NO: 989 - DNA, 48 bp, Artificial Sequence
  Description of Artificial Sequence: Synthetic oligonucleotide
  Description of Combined DNA/RNA Molecule: Synthetic oligonucleotide
ttctaggcgacacgacaacagcctgtctgcttcctccaatacauccga

SEQ ID NO: 990 - DNA, 52 bp, Artificial Sequence
  Description of Artificial Sequence: Synthetic oligonucleotide
tccagaggctactgcagagtctgttttctgcagtgtgggtactgtccgtgga

SEQ ID NO: 991 - DNA, 30 bp, Artificial Sequence
  Description of Artificial Sequence: Synthetic probe
aacaatacatccagaggctactgcagagtc

SEQ ID NO: 992 - DNA, 20 bp, Artificial Sequence
  Description of Artificial Sequence: Synthetic primer
ttctaggcgacacgacaaca

SEQ ID NO: 993 - DNA, 19 bp, Artificial Sequence
  Description of Artificial Sequence: Synthetic primer
tccacggacagtacccaca

SEQ ID NO: 994 - DNA, 42 bp, Artificial Sequence
  Description of Artificial Sequence: Synthetic primer
  Description of Combined DNA/RNA Molecule: Synthetic primer
tccacggacagtacccacagccctgtccccagaggttgcagg

SEQ ID NO: 995 - DNA, 38 bp, Artificial Sequence
  Description of Artificial Sequence: Synthetic primer
  Description of Combined DNA/RNA Molecule: Synthetic primer
acgacgacgacgaacagcagggatcaccaggcagggaa

SEQ ID NO: 996 - DNA, 36 bp, Artificial Sequence
  Description of Artificial Sequence: Synthetic primer
  Description of Combined DNA/RNA Molecule: Synthetic primer
acgacgacgacgaaggcagcagcagcagggaucact

SEQ ID NO: 997 - DNA, 46 bp, Artificial Sequence
  Description of Artificial Sequence: Synthetic primer
  Description of Combined DNA/RNA Molecule: Synthetic primer
acgacgacgacttgacgaacataatcccagcccctgctggcugcct

SEQ ID NO: 998 - DNA, 47 bp, Artificial Sequence
  Description of Artificial Sequence: Synthetic oligonucleotide
  Description of Combined DNA/RNA Molecule: Synthetic oligonucleotide
tttcaggccctaaccaccacgaagtactcctggtggcagacauggat

SEQ ID NO: 999 - DNA, 40 bp, Artificial Sequence
  Description of Artificial Sequence: Synthetic oligonucleotide
tgggccacaccaggccatgggtgggattaagggcgatgga

SEQ ID NO: 1000 - DNA, 23 bp, Artificial Sequence
  Description of Artificial Sequence: Synthetic probe
aagcagacatgggccacaccagg

SEQ ID NO: 1001 - DNA, 20 bp, Artificial Sequence
  Description of Artificial Sequence: Synthetic primer
tttcaggccctaaccaccac

SEQ ID NO: 1002 - DNA, 20 bp, Artificial Sequence
  Description of Artificial Sequence: Synthetic primer
tccatcgcccttaatcccac

SEQ ID NO: 1003 - DNA, 42 bp, Artificial Sequence
  Description of Artificial Sequence: Synthetic primer
  Description of Combined DNA/RNA Molecule: Synthetic primer
tccatcgcccttaatcccacccctgctggctgcccgtggccc

SEQ ID NO: 1004 - DNA, 41 bp, Artificial Sequence
  Description of Artificial Sequence: Synthetic primer
  Description of Combined DNA/RNA Molecule: Synthetic primer
acgacgacgacgaactgcagccagtttgtcctagcagtttg

SEQ ID NO: 1005 - DNA, 44 bp, Artificial Sequence
  Description of Artificial Sequence: Synthetic primer
  Description of Combined DNA/RNA Molecule: Synthetic primer
acgacgacgacgaagcagccagtttgtcctagcagtttaggaga

SEQ ID NO: 1006 - DNA, 53 bp, Artificial Sequence
  Description of Artificial Sequence: Synthetic primer
  Description of Combined DNA/RNA Molecule: Synthetic primer
acgacgacgacttgacgaacataatcagagagacccagggacaatgccugtga

SEQ ID NO: 1007 - DNA, 46 bp, Artificial Sequence
  Description of Artificial Sequence: Synthetic oligonucleotide
  Description of Combined DNA/RNA Molecule: Synthetic oligonucleotide
tatctcctaaaagaagccgcacgctctggctcaggcccccaggctt

SEQ ID NO: 1008 - DNA, 48 bp, Artificial Sequence
  Description of Artificial Sequence: Synthetic oligonucleotide
ggccccaacaccttcccactgagaccacgtgggattaagggcgatgga

SEQ ID NO: 1009 - DNA, 19 bp, Artificial Sequence
  Description of Artificial Sequence: Synthetic probe
ttgcccccaggccccaaca

SEQ ID NO: 1010 - DNA, 22 bp, Artificial Sequence
  Description of Artificial Sequence: Synthetic primer
tatctcctaaaagaagccgcac

SEQ ID NO: 1011 - DNA, 20 bp, Artificial Sequence
  Description of Artificial Sequence: Synthetic primer
tccatcgcccttaatcccac

SEQ ID NO: 1012 - DNA, 48 bp, Artificial Sequence
  Description of Artificial Sequence: Synthetic primer
  Description of Combined DNA/RNA Molecule: Synthetic primer
tccatcgcccttaatcccacgggacaatgcctgtggtctcaatgggag

SEQ ID NO: 1013 - DNA, 39 bp, Artificial Sequence
  Description of Artificial Sequence: Synthetic primer
  Description of Combined DNA/RNA Molecule: Synthetic primer
acgacgacgacgaatccagcaagaccagggcacauctaa

SEQ ID NO: 1014 - DNA, 41 bp, Artificial Sequence
  Description of Artificial Sequence: Synthetic primer
  Description of Combined DNA/RNA Molecule: Synthetic primer
acgacgacgacgaacagcaagaccagggcacatctagccat

SEQ ID NO: 1015 - DNA, 52 bp, Artificial Sequence
  Description of Artificial Sequence: Synthetic primer
  Description of Combined DNA/RNA Molecule: Synthetic primer
acgacgacgacttgacgaacataatcaatgaggcagtgttgctgggcagtga

SEQ ID NO: 1016 - DNA, 45 bp, Artificial Sequence
  Description of Artificial Sequence: Synthetic oligonucleotide
  Description of Combined DNA/RNA Molecule: Synthetic oligonucleotide
tcgctcttcagcctcctacagcccatagccatgcacctcaggatt

SEQ ID NO: 1017 - DNA, 47 bp, Artificial Sequence
  Description of Artificial Sequence: Synthetic oligonucleotide
ggacctagacccccaccaccaccactgttctgggaattattgccgga

SEQ ID NO: 1018 - DNA, 26 bp, Artificial Sequence
  Description of Artificial Sequence: Synthetic probe
aacacctcaggacctagacccccacc

SEQ ID NO: 1019 - DNA, 20 bp, Artificial Sequence
  Description of Artificial Sequence: Synthetic primer
tcgctcttcagcctcctaca

SEQ ID NO: 1020 - DNA, 22 bp, Artificial Sequence
  Description of Artificial Sequence: Synthetic primer
tccggcaataattcccagaaca

SEQ ID NO: 1021 - DNA, 46 bp, Artificial Sequence
  Description of Artificial Sequence: Synthetic primer
  Description of Combined DNA/RNA Molecule: Synthetic primer
tccggcaataattcccagaacagttgctgggcagtggtgatggtga

SEQ ID NO: 1022 - DNA, 42 bp, Artificial Sequence
  Description of Artificial Sequence: Synthetic primer
  Description of Combined DNA/RNA Molecule: Synthetic primer
acgacgacgacgaaccacaggacagaagcagagagcagaata

SEQ ID NO: 1023 - DNA, 40 bp, Artificial Sequence
  Description of Artificial Sequence: Synthetic primer
  Description of Combined DNA/RNA Molecule: Synthetic primer
acgacgacgacgaagccccacaggacagaagcagagagcg

SEQ ID NO: 1024 - DNA, 51 bp, Artificial Sequence
  Description of Artificial Sequence: Synthetic primer
  Description of Combined DNA/RNA Molecule: Synthetic primer
acgacgacgacttgacgaacataatggtgggctgtttgctctggtgggtga

SEQ ID NO: 1025 - DNA, 44 bp, Artificial Sequence
  Description of Artificial Sequence: Synthetic oligonucleotide
  Description of Combined DNA/RNA Molecule: Synthetic oligonucleotide
ttcaacgatcgcgcagacagggctccctcagatgccgcaccctg

SEQ ID NO: 1026 - DNA, 41 bp, Artificial Sequence
  Description of Artificial Sequence: Synthetic oligonucleotide
ccccacccaggcagcctggtgttctgggaattattgccgga

SEQ ID NO: 1027 - DNA, 19 bp, Artificial Sequence
  Description of Artificial Sequence: Synthetic probe
tttgccgcaccccacccag

SEQ ID NO: 1028 - DNA, 19 bp, Artificial Sequence
  Description of Artificial Sequence: Synthetic primer
ttcaacgatcgcgcagaca

SEQ ID NO: 1029 - DNA, 22 bp, Artificial Sequence
  Description of Artificial Sequence: Synthetic primer
tccggcaataattcccagaaca

SEQ ID NO: 1030 - DNA, 47 bp, Artificial Sequence
  Description of Artificial Sequence: Synthetic primer
  Description of Combined DNA/RNA Molecule: Synthetic primer
tccggcaataattcccagaacatgaggccaggtcagggaggtgccct

SEQ ID NO: 1031 - DNA, 44 bp, Artificial Sequence
  Description of Artificial Sequence: Synthetic primer
  Description of Combined DNA/RNA Molecule: Synthetic primer
acgacgacgacgaactccagagccagggtttgtaaaccaaggct

SEQ ID NO: 1032 - DNA, 43 bp, Artificial Sequence
  Description of Artificial Sequence: Synthetic primer
  Description of Combined DNA/RNA Molecule: Synthetic primer
acgacgacgacgaagagccagggtttgtaaaccaaggccagaa

SEQ ID NO: 1033 - DNA, 49 bp, Artificial Sequence
  Description of Artificial Sequence: Synthetic primer
  Description of Combined DNA/RNA Molecule: Synthetic primer
acgacgacgacttgacgaacataattgacctgccctgctgcctccacta

SEQ ID NO: 1034 - DNA, 44 bp, Artificial Sequence
  Description of Artificial Sequence: Synthetic oligonucleotide
  Description of Combined DNA/RNA Molecule: Synthetic oligonucleotide
tcactatcggcgtagtcaccagtccccatgggccaaacacaccc

SEQ ID NO: 1035 - DNA, 57 bp, Artificial Sequence
  Description of Artificial Sequence: Synthetic oligonucleotide
cacttttttcttgtccaggtgcactcagtcactggtgtggtgactttacccggagga

SEQ ID NO: 1036 - DNA, 33 bp, Artificial Sequence
  Description of Artificial Sequence: Synthetic probe
ttccaaacacacttttttcttgtccaggtgcac

SEQ ID NO: 1037 - DNA, 21 bp, Artificial Sequence
  Description of Artificial Sequence: Synthetic primer
tcactatcggcgtagtcacca

SEQ ID NO: 1038 - DNA, 20 bp, Artificial Sequence
  Description of Artificial Sequence: Synthetic primer
tcctccgggtaaagtcacca

SEQ ID NO: 1039 - DNA, 42 bp, Artificial Sequence
  Description of Artificial Sequence: Synthetic primer
  Description of Combined DNA/RNA Molecule: Synthetic primer
acgacgacgacgaacagccaggacaggtttctctgcagattt

SEQ ID NO: 1040 - DNA, 42 bp, Artificial Sequence
  Description of Artificial Sequence: Synthetic primer
  Description of Combined DNA/RNA Molecule: Synthetic primer
acgacgacgacgaatgttgtcagccaggacaggtttcuctgt

SEQ ID NO: 1041 - DNA, 51 bp, Artificial Sequence
  Description of Artificial Sequence: Synthetic primer
  Description of Combined DNA/RNA Molecule: Synthetic primer
acgacgacgacttgacgaacataatggagcaatagcagctgcctgguggct

SEQ ID NO: 1042 - DNA, 58 bp, Artificial Sequence
  Description of Artificial Sequence: Synthetic oligonucleotide
  Description of Combined DNA/RNA Molecule: Synthetic oligonucleotide
tcatctgttcgtcagggtccactttgaaatgaaataatgtgatgcacaccgcaataga

SEQ ID NO: 1043 - DNA, 48 bp, Artificial Sequence
  Description of Artificial Sequence: Synthetic oligonucleotide
ataagggccagcctgtaatgaggcccagtggtgactttacccggagga

SEQ ID NO: 1044 - DNA, 26 bp, Artificial Sequence
  Description of Artificial Sequence: Synthetic probe
ttcaccgcaataagggccagcctgta

SEQ ID NO: 1045 - DNA, 21 bp, Artificial Sequence
  Description of Artificial Sequence: Synthetic primer
tcatctgttcgtcagggtcca

SEQ ID NO: 1046 - DNA, 20 bp, Artificial Sequence
  Description of Artificial Sequence: Synthetic primer
tcctccgggtaaagtcacca

SEQ ID NO: 1047 - DNA, 46 bp, Artificial Sequence
  Description of Artificial Sequence: Synthetic primer
  Description of Combined DNA/RNA Molecule: Synthetic primer
tcctccgggtaaagtcaccagagcaatagcagctgcctgatggccc

SEQ ID NO: 1048 - DNA, 43 bp, Artificial Sequence
  Description of Artificial Sequence: Synthetic primer
  Description of Combined DNA/RNA Molecule: Synthetic primer
acgacgacgacgaacagcactggcaagtcagttttccagtggt

SEQ ID NO: 1049 - DNA, 41 bp, Artificial Sequence
  Description of Artificial Sequence: Synthetic primer
  Description of Combined DNA/RNA Molecule: Synthetic primer
acgacgacgacgaaacttcattggcagcactggcaagtcaa

SEQ ID NO: 1050 - DNA, 51 bp, Artificial Sequence
  Description of Artificial Sequence: Synthetic primer
  Description of Combined DNA/RNA Molecule: Synthetic primer
acgacgacgacttgacgaacataatctgtgaccatgaccctggcacuggaa

SEQ ID NO: 1051 - DNA, 47 bp, Artificial Sequence
  Description of Artificial Sequence: Synthetic oligonucleotide
  Description of Combined DNA/RNA Molecule: Synthetic oligonucleotide
ttcgtacctcggcacaccaagcagcactagttggtctgcgcaaaatg

SEQ ID NO: 1052 - DNA, 54 bp, Artificial Sequence
  Description of Artificial Sequence: Synthetic oligonucleotide
aaacatttcccttctcactccatgtgtcccattctggctccgttactctgtcga

SEQ ID NO: 1053 - DNA, 32 bp, Artificial Sequence
  Description of Artificial Sequence: Synthetic probe
aactgcgcaaaacatttcccttctcactccat

SEQ ID NO: 1054 - DNA, 19 bp, Artificial Sequence
  Description of Artificial Sequence: Synthetic primer
ttcgtacctcggcacacca

SEQ ID NO: 1055 - DNA, 20 bp, Artificial Sequence
  Description of Artificial Sequence: Synthetic primer
tcgacagagtaacggagcca

SEQ ID NO: 1056 - DNA, 47 bp, Artificial Sequence
  Description of Artificial Sequence: Synthetic primer
  Description of Combined DNA/RNA Molecule: Synthetic primer
tcgacagagtaacggagccacatgaccctggcactggaggatgtgga

SEQ ID NO: 1057 - DNA, 48 bp, Artificial Sequence
  Description of Artificial Sequence: Synthetic primer
  Description of Combined DNA/RNA Molecule: Synthetic primer
acgacgacgacgaaagaccacaagtttacaaatgcaaacaccaagggt

SEQ ID NO: 1058 - DNA, 51 bp, Artificial Sequence
  Description of Artificial Sequence: Synthetic primer
  Description of Combined DNA/RNA Molecule: Synthetic primer
acgacgacgacttgacgaacataatgagcaaggagctgggctttccugagt

SEQ ID NO: 1059 - DNA, 45 bp, Artificial Sequence
  Description of Artificial Sequence: Synthetic oligonucleotide
  Description of Combined DNA/RNA Molecule: Synthetic oligonucleotide
tctacagctagatgcggccaagggcaatgctggctccgcauccga

SEQ ID NO: 1060 - DNA, 44 bp, Artificial Sequence
  Description of Artificial Sequence: Synthetic oligonucleotide
tccaggcaatcttccctgccaggctggctccgttactctgtcga

SEQ ID NO: 1061 - DNA, 27 bp, Artificial Sequence
  Description of Artificial Sequence: Synthetic probe
ttctccgcatccaggcaatcttccctg

SEQ ID NO: 1062 - DNA, 20 bp, Artificial Sequence
  Description of Artificial Sequence: Synthetic primer
tctacagctagatgcggcca

SEQ ID NO: 1063 - DNA, 20 bp, Artificial Sequence
  Description of Artificial Sequence: Synthetic primer
tcgacagagtaacggagcca

SEQ ID NO: 1064 - DNA, 45 bp, Artificial Sequence
  Description of Artificial Sequence: Synthetic primer
  Description of Combined DNA/RNA Molecule: Synthetic primer
tcgacagagtaacggagccagctttcctgagctgtggcttggcaa

SEQ ID NO: 1065 - DNA, 41 bp, Artificial Sequence
  Description of Artificial Sequence: Synthetic primer
  Description of Combined DNA/RNA Molecule: Synthetic primer
acgacgacgacgaacccacttctcacagccatcccagggaa

SEQ ID NO: 1066 - DNA, 40 bp, Artificial Sequence
  Description of Artificial Sequence: Synthetic primer
  Description of Combined DNA/RNA Molecule: Synthetic primer
acgacgacgacgaactgagccccacttctcacagccatct

SEQ ID NO: 1067 - DNA, 52 bp, Artificial Sequence
  Description of Artificial Sequence: Synthetic primer
  Description of Combined DNA/RNA Molecule: Synthetic primer
acgacgacgacttgacgaacataatagatgcatgaggctgctgagaaggagg

SEQ ID NO: 1068 - DNA, 47 bp, Artificial Sequence
  Description of Artificial Sequence: Synthetic oligonucleotide
  Description of Combined DNA/RNA Molecule: Synthetic oligonucleotide
tagcgatagtaccgacagtcacaagagctcacagccccatcacacca

SEQ ID NO: 1069 - DNA, 51 bp, Artificial Sequence
  Description of Artificial Sequence: Synthetic oligonucleotide
cactgacaggcatcagctgtctccatctgtcgtgcggaaacctatcgtcga

SEQ ID NO: 1070 - DNA, 27 bp, Artificial Sequence
  Description of Artificial Sequence: Synthetic probe
ttcccatcacactgacaggcatcagct

SEQ ID NO: 1071 - DNA, 22 bp, Artificial Sequence
  Description of Artificial Sequence: Synthetic primer
tagcgatagtaccgacagtcac

SEQ ID NO: 1072 - DNA, 20 bp, Artificial Sequence
  Description of Artificial Sequence: Synthetic primer
tcgacgataggtttccgcac

SEQ ID NO: 1073 - DNA, 52 bp, Artificial Sequence
  Description of Artificial Sequence: Synthetic primer
  Description of Combined DNA/RNA Molecule: Synthetic primer
tcgacgataggtttccgcacgagaaggagagtgtgtgtcagacaggtggagg

SEQ ID NO: 1074 - DNA, 44 bp, Artificial Sequence
  Description of Artificial Sequence: Synthetic primer
  Description of Combined DNA/RNA Molecule: Synthetic primer
acgacgacgacgaagaattcagaacccaagctttgggcagcagg

SEQ ID NO: 1075 - DNA, 45 bp, Artificial Sequence
  Description of Artificial Sequence: Synthetic primer
  Description of Combined DNA/RNA Molecule: Synthetic primer
acgacgacgacgaaggaagagcagaattcagaacccaagcuttga

SEQ ID NO: 1076 - DNA, 49 bp, Artificial Sequence
  Description of Artificial Sequence: Synthetic primer
  Description of Combined DNA/RNA Molecule: Synthetic primer
acgacgacgacttgacgaacataatctgctgctcccccttgtgcuggct

SEQ ID NO: 1077 - DNA, 44 bp, Artificial Sequence
  Description of Artificial Sequence: Synthetic oligonucleotide
  Description of Combined DNA/RNA Molecule: Synthetic oligonucleotide
tccagggtatttggcgcacgcagagcaggacagggcgcaggtaa

SEQ ID NO: 1078 - DNA, 42 bp, Artificial Sequence
  Description of Artificial Sequence: Synthetic oligonucleotide
ggtgggcacagcctccaggagggtgcggaaacctatcgtcga

SEQ ID NO: 1079 - DNA, 19 bp, Artificial Sequence
  Description of Artificial Sequence: Synthetic probe
ttgggcgcaggtgggcaca

SEQ ID NO: 1080 - DNA, 19 bp, Artificial Sequence
  Description of Artificial Sequence: Synthetic primer
tccagggtatttggcgcac

SEQ ID NO: 1081 - DNA, 20 bp, Artificial Sequence
  Description of Artificial Sequence: Synthetic primer
tcgacgataggtttccgcac

SEQ ID NO: 1082 - DNA, 44 bp, Artificial Sequence
  Description of Artificial Sequence: Synthetic primer
  Description of Combined DNA/RNA Molecule: Synthetic primer
tcgacgataggtttccgcacccccttgtgctggcctcttggaga

SEQ ID NO: 1083 - DNA, 44 bp, Artificial Sequence
  Description of Artificial Sequence: Synthetic primer
  Description of Combined DNA/RNA Molecule: Synthetic primer
acgacgacgacgaagcacaatccagaggatggattagcactgcc

SEQ ID NO: 1084 - DNA, 42 bp, Artificial Sequence
  Description of Artificial Sequence: Synthetic primer
  Description of Combined DNA/RNA Molecule: Synthetic primer
acgacgacgacgaaccactctcccagcacaatccaggggata

SEQ ID NO: 1085 - DNA, 50 bp, Artificial Sequence
  Description of Artificial Sequence: Synthetic primer
  Description of Combined DNA/RNA Molecule: Synthetic primer
acgacgacgacttgacgaacataatggtgccccctgtgcaaaaccucctt

SEQ ID NO: 1086 - DNA, 44 bp, Artificial Sequence
  Description of Artificial Sequence: Synthetic oligonucleotide
  Description of Combined DNA/RNA Molecule: Synthetic oligonucleotide
tccctcgtcatctcccttaccggcctccagagaccctcactaaa

SEQ ID NO: 1087 - DNA, 42 bp, Artificial Sequence
  Description of Artificial Sequence: Synthetic oligonucleotide
ctagagggaccccacaggcagggggtcttggtgatggagcga

SEQ ID NO: 1088 - DNA, 26 bp, Artificial Sequence
  Description of Artificial Sequence: Synthetic probe
ttaccctcactagagggaccccacag

SEQ ID NO: 1089 - DNA, 21 bp, Artificial Sequence
  Description of Artificial Sequence: Synthetic primer
tccctcgtcatctcccttacc

SEQ ID NO: 1090 - DNA, 19 bp, Artificial Sequence
  Description of Artificial Sequence: Synthetic primer
tcgctccatcaccaagacc

SEQ ID NO: 1091 - DNA, 46 bp, Artificial Sequence
  Description of Artificial Sequence: Synthetic primer
  Description of Combined DNA/RNA Molecule: Synthetic primer
tcgctccatcaccaagaccccctgtgcaaaacctcctccttggcat

SEQ ID NO: 1092 - DNA, 39 bp, Artificial Sequence
  Description of Artificial Sequence: Synthetic primer
  Description of Combined DNA/RNA Molecule: Synthetic primer
acgacgacgacgaagtccagggcaggtgtttgcagggta

SEQ ID NO: 1093 - DNA, 36 bp, Artificial Sequence
  Description of Artificial Sequence: Synthetic primer
  Description of Combined DNA/RNA Molecule: Synthetic primer
acgacgacgacgaacctggtccagggcaggtgttta

SEQ ID NO: 1094 - DNA, 54 bp, Artificial Sequence
  Description of Artificial Sequence: Synthetic primer
  Description of Combined DNA/RNA Molecule: Synthetic primer
acgacgacgacttgacgaacataattccttcctctctccacccagtgaaugaac

SEQ ID NO: 1095 - DNA, 47 bp, Artificial Sequence
  Description of Artificial Sequence: Synthetic oligonucleotide
  Description of Combined DNA/RNA Molecule: Synthetic oligonucleotide
tcataatgttgtcagcccgaccccaaagcagaggcatcatcaagtca

SEQ ID NO: 1096 - DNA, 54 bp, Artificial Sequence
  Description of Artificial Sequence: Synthetic oligonucleotide
agttgaagacatgtactccaagcactcctgcattcggtcttggtgatggagcga

SEQ ID NO: 1097 - DNA, 35 bp, Artificial Sequence
  Description of Artificial Sequence: Synthetic probe
ttatcatcaagttgaagacatgtactccaagcact

SEQ ID NO: 1098 - DNA, 22 bp, Artificial Sequence
  Description of Artificial Sequence: Synthetic primer
tcataatgttgtcagcccgacc

SEQ ID NO: 1099 - DNA, 19 bp, Artificial Sequence
  Description of Artificial Sequence: Synthetic primer
tcgctccatcaccaagacc

SEQ ID NO: 1100 - DNA, 52 bp, Artificial Sequence
  Description of Artificial Sequence: Synthetic primer
  Description of Combined DNA/RNA Molecule: Synthetic primer
tcgctccatcaccaagacccctctctccacccagtgaatgaatgagtgcaga

SEQ ID NO: 1101 - DNA, 36 bp, Artificial Sequence
  Description of Artificial Sequence: Synthetic primer
  Description of Combined DNA/RNA Molecule: Synthetic primer
acgacgacgacgaacacagggccagctgccaucagt

SEQ ID NO: 1102 - DNA, 36 bp, Artificial Sequence
  Description of Artificial Sequence: Synthetic primer
  Description of Combined DNA/RNA Molecule: Synthetic primer
acgacgacgacgaaggtcccacagggccagcugccg

SEQ ID NO: 1103 - DNA, 53 bp, Artificial Sequence
  Description of Artificial Sequence: Synthetic primer
  Description of Combined DNA/RNA Molecule: Synthetic primer
acgacgacgacttgacgaacataatgggctgctgcttatatctgtgccaggta

SEQ ID NO: 1104 - DNA, 46 bp, Artificial Sequence
  Description of Artificial Sequence: Synthetic oligonucleotide
  Description of Combined DNA/RNA Molecule: Synthetic oligonucleotide
tacgaatcacccgagagttcaaccccttcccagcagccgcaacctt

SEQ ID NO: 1105 - DNA, 48 bp, Artificial Sequence
  Description of Artificial Sequence: Synthetic oligonucleotide
acccctccccactgacctcactcaagttgtgggtgggtataggtcaga

SEQ ID NO: 1106 - DNA, 19 bp, Artificial Sequence
  Description of Artificial Sequence: Synthetic probe
ttagccgcaacccctcccc

SEQ ID NO: 1107 - DNA, 22 bp, Artificial Sequence
  Description of Artificial Sequence: Synthetic primer
tacgaatcacccgagagttcaa

SEQ ID NO: 1108 - DNA, 22 bp, Artificial Sequence
  Description of Artificial Sequence: Synthetic primer
tctgacctatacccacccacaa

SEQ ID NO: 1109 - DNA, 53 bp, Artificial Sequence
  Description of Artificial Sequence: Synthetic primer
  Description of Combined DNA/RNA Molecule: Synthetic primer
tctgacctatacccacccacaacttatatctgtgccaggtggtggcctgagta

SEQ ID NO: 1110 - DNA, 43 bp, Artificial Sequence
  Description of Artificial Sequence: Synthetic primer
  Description of Combined DNA/RNA Molecule: Synthetic primer
acgacgacgacgaactgcaatgatttccagggtggacaagtcc

SEQ ID NO: 1111 - DNA, 41 bp, Artificial Sequence
  Description of Artificial Sequence: Synthetic primer
  Description of Combined DNA/RNA Molecule: Synthetic primer
acgacgacgacgaacccctgcaatgatttccagggtggacg

SEQ ID NO: 1112 - DNA, 52 bp, Artificial Sequence
  Description of Artificial Sequence: Synthetic primer
  Description of Combined DNA/RNA Molecule: Synthetic primer
acgacgacgacttgacgaacataatcctgcttccccagtcttccaacugcaa

SEQ ID NO: 1113 - DNA, 51 bp, Artificial Sequence
  Description of Artificial Sequence: Synthetic oligonucleotide
  Description of Combined DNA/RNA Molecule: Synthetic oligonucleotide
tacgaatcacccgagagttcaagctttgagagggtcagagggttcaagaat

SEQ ID NO: 1114 - DNA, 54 bp, Artificial Sequence
  Description of Artificial Sequence: Synthetic oligonucleotide
agagcaccaagagagagtccaggaggcagatgttgtgggtgggtataggtcaga

SEQ ID NO: 1115 - DNA, 30 bp, Artificial Sequence
  Description of Artificial Sequence: Synthetic probe
ttgggttcaagagcaccaagagagagtcca

SEQ ID NO: 1116 - DNA, 22 bp, Artificial Sequence
  Description of Artificial Sequence: Synthetic primer
tacgaatcacccgagagttcaa

SEQ ID NO: 1117 - DNA, 22 bp, Artificial Sequence
  Description of Artificial Sequence: Synthetic primer
tctgacctatacccacccacaa

SEQ ID NO: 1118 - DNA, 50 bp, Artificial Sequence
  Description of Artificial Sequence: Synthetic primer
  Description of Combined DNA/RNA Molecule: Synthetic primer
tctgacctatacccacccacaacccagtcttccaactgcagctttccatt

SEQ ID NO: 1119 - DNA, 44 bp, Artificial Sequence
  Description of Artificial Sequence: Synthetic primer
  Description of Combined DNA/RNA Molecule: Synthetic primer
acgacgacgacgaagccaagaacagcctttctcagaccauccat

SEQ ID NO: 1120 - DNA, 46 bp, Artificial Sequence
  Description of Artificial Sequence: Synthetic primer
  Description of Combined DNA/RNA Molecule: Synthetic primer
acgacgacgacgaagatgagccaagaacagcctttctcagaccatt

SEQ ID NO: 1121 - DNA, 51 bp, Artificial Sequence
  Description of Artificial Sequence: Synthetic primer
  Description of Combined DNA/RNA Molecule: Synthetic primer
acgacgacgacttgacgaacataatcatcccactctggcatgtggcuttcc

SEQ ID NO: 1122 - DNA, 55 bp, Artificial Sequence
  Description of Artificial Sequence: Synthetic oligonucleotide
  Description of Combined DNA/RNA Molecule: Synthetic oligonucleotide
taggaacacggaggacatcaacccctactctacacttcaatcttctctcaugagg

SEQ ID NO: 1123 - DNA, 62 bp, Artificial Sequence
  Description of Artificial Sequence: Synthetic oligonucleotide
tgaaaccttcacttgcttttctacaacattgacctaaggcttgtgggtgggtataggtcaga

SEQ ID NO: 1124 - DNA, 40 bp, Artificial Sequence
  Description of Artificial Sequence: Synthetic probe
aatctctcatgaaaccttcacttgcttttctacaacattg

SEQ ID NO: 1125 - DNA, 21 bp, Artificial Sequence
  Description of Artificial Sequence: Synthetic primer
taggaacacggaggacatcaa

SEQ ID NO: 1126 - DNA, 22 bp, Artificial Sequence
  Description of Artificial Sequence: Synthetic primer
tctgacctatacccacccacaa

SEQ ID NO: 1127 - DNA, 49 bp, Artificial Sequence
  Description of Artificial Sequence: Synthetic primer
  Description of Combined DNA/RNA Molecule: Synthetic primer
tctgacctatacccacccacaaccactctggcatgtggctttttgcctc

SEQ ID NO: 1128 - DNA, 37 bp, Artificial Sequence
  Description of Artificial Sequence: Synthetic primer
  Description of Combined DNA/RNA Molecule: Synthetic primer
acgacgacgacgaacttcagcctggccaggcagggag

SEQ ID NO: 1129 - DNA, 41 bp, Artificial Sequence
  Description of Artificial Sequence: Synthetic primer
  Description of Combined DNA/RNA Molecule: Synthetic primer
acgacgacgacgaaccaccaaatccttcagcctggccaggt

SEQ ID NO: 1130 - DNA, 55 bp, Artificial Sequence
  Description of Artificial Sequence: Synthetic primer
  Description of Combined DNA/RNA Molecule: Synthetic primer
acgacgacgacttgacgaacataatgtggatgctttgcagaaatctggcccctgg

SEQ ID NO: 1131 - DNA, 46 bp, Artificial Sequence
  Description of Artificial Sequence: Synthetic oligonucleotide
  Description of Combined DNA/RNA Molecule: Synthetic oligonucleotide
tctcataaacactccggccacgccaggtccaggagacaacagggtc

SEQ ID NO: 1132 - DNA, 51 bp, Artificial Sequence
  Description of Artificial Sequence: Synthetic oligonucleotide
gggctcactgtgccttcagacctacactctggtggctcaataacgggcaga

SEQ ID NO: 1133 - DNA, 28 bp, Artificial Sequence
  Description of Artificial Sequence: Synthetic probe
ttgacaacagggctcactgtgccttcag

SEQ ID NO: 1134 - DNA, 21 bp, Artificial Sequence
  Description of Artificial Sequence: Synthetic primer
tctcataaacactccggccac

SEQ ID NO: 1135 - DNA, 20 bp, Artificial Sequence
  Description of Artificial Sequence: Synthetic primer
tctgcccgttattgagccac

SEQ ID NO: 1136 - DNA, 47 bp, Artificial Sequence
  Description of Artificial Sequence: Synthetic primer
  Description of Combined DNA/RNA Molecule: Synthetic primer
tctgcccgttattgagccacgctttgcagaaatctggcccttgagcg

SEQ ID NO: 1137 - DNA, 43 bp, Artificial Sequence
  Description of Artificial Sequence: Synthetic primer
  Description of Combined DNA/RNA Molecule: Synthetic primer
acgacgacgacgaagcataggtgcagctctcactgacaaatta

SEQ ID NO: 1138 - DNA, 41 bp, Artificial Sequence
  Description of Artificial Sequence: Synthetic primer
  Description of Combined DNA/RNA Molecule: Synthetic primer
acgacgacgacgaaccatggcataggtgcagctctcactgg

SEQ ID NO: 1139 - DNA, 55 bp, Artificial Sequence
  Description of Artificial Sequence: Synthetic primer
  Description of Combined DNA/RNA Molecule: Synthetic primer
acgacgacgacttgacgaacataatcagcatggccttctctgatctgctcatctc

SEQ ID NO: 1140 - DNA, 46 bp, Artificial Sequence
  Description of Artificial Sequence: Synthetic oligonucleotide
  Description of Combined DNA/RNA Molecule: Synthetic oligonucleotide
ttgattgggatcgttcgcacgtcaccaaagttccagggtcagtatc

SEQ ID NO: 1141 - DNA, 49 bp, Artificial Sequence
  Description of Artificial Sequence: Synthetic oligonucleotide
gtactgccagaggcaaacaaggtccaggggtggctcaataacgggcaga

SEQ ID NO: 1142 - DNA, 28 bp, Artificial Sequence
  Description of Artificial Sequence: Synthetic probe
ttagggtcagtactgccagaggcaaaca

SEQ ID NO: 1143 - DNA, 20 bp, Artificial Sequence
  Description of Artificial Sequence: Synthetic primer
ttgattgggatcgttcgcac

SEQ ID NO: 1144 - DNA, 20 bp, Artificial Sequence
  Description of Artificial Sequence: Synthetic primer
tctgcccgttattgagccac

SEQ ID NO: 1145 - DNA, 40 bp, Artificial Sequence
  Description of Artificial Sequence: Synthetic primer
  Description of Combined DNA/RNA Molecule: Synthetic primer
acgacgacgacgaactcccaggccccttttaagcacttga

SEQ ID NO: 1146 - DNA, 38 bp, Artificial Sequence
  Description of Artificial Sequence: Synthetic primer
  Description of Combined DNA/RNA Molecule: Synthetic primer
acgacgacgacgaagggttcatcctcccaggccccttc

SEQ ID NO: 1147 - DNA, 50 bp, Artificial Sequence
  Description of Artificial Sequence: Synthetic primer
  Description of Combined DNA/RNA Molecule: Synthetic primer
acgacgacgacttgacgaacataatgtctccctgcctctgccaccuttcc

SEQ ID NO: 1148 - DNA, 52 bp, Artificial Sequence
  Description of Artificial Sequence: Synthetic oligonucleotide
  Description of Combined DNA/RNA Molecule: Synthetic oligonucleotide
tctgcccaaaatactgcacaacactaggaatgtaccaacagcccccagagaa

SEQ ID NO: 1149 - DNA, 48 bp, Artificial Sequence
  Description of Artificial Sequence: Synthetic oligonucleotide
gagggaggacaaggcagagagccacccttgaaactgaggcggtgttca

SEQ ID NO: 1150 - DNA, 23 bp, Artificial Sequence
  Description of Artificial Sequence: Synthetic probe
ttgcccccagagggaggacaagg

SEQ ID NO: 1151 - DNA, 21 bp, Artificial Sequence
  Description of Artificial Sequence: Synthetic primer
tctgcccaaaatactgcacaa

SEQ ID NO: 1152 - DNA, 21 bp, Artificial Sequence
  Description of Artificial Sequence: Synthetic primer
tgaacaccgcctcagtttcaa

SEQ ID NO: 1153 - DNA, 49 bp, Artificial Sequence
  Description of Artificial Sequence: Synthetic primer
  Description of Combined DNA/RNA Molecule: Synthetic primer
tgaacaccgcctcagtttcaaccacctttcttgggtggctctttgcctc

SEQ ID NO: 1154 - DNA, 45 bp, Artificial Sequence
  Description of Artificial Sequence: Synthetic primer
  Description of Combined DNA/RNA Molecule: Synthetic primer
acgacgacgacgaagttgagctcattcacattctgcagcaggtga

SEQ ID NO: 1155 - DNA, 41 bp, Artificial Sequence
  Description of Artificial Sequence: Synthetic primer
  Description of Combined DNA/RNA Molecule: Synthetic primer
acgacgacgacgaacttgcacaaggccaagagccacuggtc

SEQ ID NO: 1156 - DNA, 54 bp, Artificial Sequence
  Description of Artificial Sequence: Synthetic primer
  Description of Combined DNA/RNA Molecule: Synthetic primer
acgacgacgacttgacgaacataatgcaaggtgagaccccactgtgatggggaa

SEQ ID NO: 1157 - DNA, 43 bp, Artificial Sequence
  Description of Artificial Sequence: Synthetic oligonucleotide
  Description of Combined DNA/RNA Molecule: Synthetic oligonucleotide
tatggactgtaccagcccaaggaggcaatcaggagacaggtaa

SEQ ID NO: 1158 - DNA, 47 bp, Artificial Sequence
  Description of Artificial Sequence: Synthetic oligonucleotide
ggtgggaacagagggacaccccccacttgaaactgaggcggtgttca

SEQ ID NO: 1159 - DNA, 28 bp, Artificial Sequence
  Description of Artificial Sequence: Synthetic probe
ttggagacaggtgggaacagagggacac

SEQ ID NO: 1160 - DNA, 20 bp, Artificial Sequence
  Description of Artificial Sequence: Synthetic primer
tatggactgtaccagcccaa

SEQ ID NO: 1161 - DNA, 21 bp, Artificial Sequence
  Description of Artificial Sequence: Synthetic primer
tgaacaccgcctcagtttcaa

SEQ ID NO: 1162 - DNA, 47 bp, Artificial Sequence
  Description of Artificial Sequence: Synthetic primer
  Description of Combined DNA/RNA Molecule: Synthetic primer
tgaacaccgcctcagtttcaagaccccactgtgatgaggaatgggag

SEQ ID NO: 1163 - DNA, 41 bp, Artificial Sequence
  Description of Artificial Sequence: Synthetic primer
  Description of Combined DNA/RNA Molecule: Synthetic primer
acgacgacgacgaacacttctgggagtgcatgtgcautgcc

SEQ ID NO: 1164 - DNA, 41 bp, Artificial Sequence
  Description of Artificial Sequence: Synthetic primer
  Description of Combined DNA/RNA Molecule: Synthetic primer
acgacgacgacgaattccagcacttctgggagtgcaugtgt

SEQ ID NO: 1165 - DNA, 48 bp, Artificial Sequence
  Description of Artificial Sequence: Synthetic primer
  Description of Combined DNA/RNA Molecule: Synthetic primer
acgacgacgacttgacgaacataatgctgaggttgctgtgggactgga

SEQ ID NO: 1166 - DNA, 45 bp, Artificial Sequence
  Description of Artificial Sequence: Synthetic oligonucleotide
  Description of Combined DNA/RNA Molecule: Synthetic oligonucleotide
tttgcctcttgtaggtgccactgagcatggcctgagctcagtcaa

SEQ ID NO: 1167 - DNA, 44 bp, Artificial Sequence
  Description of Artificial Sequence: Synthetic oligonucleotide
gtcagcagccaggcaccagtggcagtgggcaacgcggatattca

SEQ ID NO: 1168 - DNA, 24 bp, Artificial Sequence
  Description of Artificial Sequence: Synthetic probe
aagagctcagtcagcagccaggca

SEQ ID NO: 1169 - DNA, 20 bp, Artificial Sequence
  Description of Artificial Sequence: Synthetic primer
tttgcctcttgtaggtgcca

SEQ ID NO: 1170 - DNA, 19 bp, Artificial Sequence
  Description of Artificial Sequence: Synthetic primer
tgaatatccgcgttgccca

SEQ ID NO: 1171 - DNA, 42 bp, Artificial Sequence
  Description of Artificial Sequence: Synthetic primer
  Description of Combined DNA/RNA Molecule: Synthetic primer
tgaatatccgcgttgcccaggactgagggctgccattggtgt

SEQ ID NO: 1172 - DNA, 34 bp, Artificial Sequence
  Description of Artificial Sequence: Synthetic primer
  Description of Combined DNA/RNA Molecule: Synthetic primer
acgacgacgacgaagcccagcctggcccagccta

SEQ ID NO: 1173 - DNA, 30 bp, Artificial Sequence
  Description of Artificial Sequence: Synthetic primer
acgacgacgacgaacccagcccagcctggc

SEQ ID NO: 1174 - DNA, 53 bp, Artificial Sequence
  Description of Artificial Sequence: Synthetic primer
  Description of Combined DNA/RNA Molecule: Synthetic primer
acgacgacgacttgacgaacataatccatggtgggtactcactgaggcugagg

SEQ ID NO: 1175 - DNA, 47 bp, Artificial Sequence
  Description of Artificial Sequence: Synthetic oligonucleotide
  Description of Combined DNA/RNA Molecule: Synthetic oligonucleotide
tgtcgcccggtagcaataaaccagtctctgcccaggctggcacccga

SEQ ID NO: 1176 - DNA, 53 bp, Artificial Sequence
  Description of Artificial Sequence: Synthetic oligonucleotide
cccaggaatgtggtcaacaagaagccccaacgtttccgcgatctttgcattca

SEQ ID NO: 1177 - DNA, 28 bp, Artificial Sequence
  Description of Artificial Sequence: Synthetic probe
ttgctggcacccaggaatgtggtcaaca

SEQ ID NO: 1178 - DNA, 21 bp, Artificial Sequence
  Description of Artificial Sequence: Synthetic primer
tgtcgcccggtagcaataaac

SEQ ID NO: 1179 - DNA, 22 bp, Artificial Sequence
  Description of Artificial Sequence: Synthetic primer
tgaatgcaaagatcgcggaaac

SEQ ID NO: 1180 - DNA, 47 bp, Artificial Sequence
  Description of Artificial Sequence: Synthetic primer
  Description of Combined DNA/RNA Molecule: Synthetic primer
tgaatgcaaagatcgcggaaactgaggctgagaggccatgttgtgcc

SEQ ID NO: 1181 - DNA, 52 bp, Artificial Sequence
  Description of Artificial Sequence: Synthetic primer
  Description of Combined DNA/RNA Molecule: Synthetic primer
acgacgacgacgaactccagattcagaggcagtgtataaaacatacactgcc

SEQ ID NO: 1182 - DNA, 45 bp, Artificial Sequence
  Description of Artificial Sequence: Synthetic primer
  Description of Combined DNA/RNA Molecule: Synthetic primer
acgacgacgacgaatggactccagattcagaggcagtgtauaaag

SEQ ID NO: 1183 - DNA, 52 bp, Artificial Sequence
  Description of Artificial Sequence: Synthetic primer
  Description of Combined DNA/RNA Molecule: Synthetic primer
acgacgacgacttgacgaacataattgaggacccaaatgaccctgccuggaa

SEQ ID NO: 1184 - DNA, 50 bp, Artificial Sequence
  Description of Artificial Sequence: Synthetic oligonucleotide
  Description of Combined DNA/RNA Molecule: Synthetic oligonucleotide
tgtgcactagtccacgtgaaaccttcaggaactgcaaggagggcacagca

SEQ ID NO: 1185 - DNA, 51 bp, Artificial Sequence
  Description of Artificial Sequence: Synthetic oligonucleotide
cagtgggagacatccagggacagaaggccgtttccgcgatctttgcattca

SEQ ID NO: 1186 - DNA, 27 bp, Artificial Sequence
  Description of Artificial Sequence: Synthetic probe
ttgagggcacagtgggagacatccagg

SEQ ID NO: 1187 - DNA, 22 bp, Artificial Sequence
  Description of Artificial Sequence: Synthetic primer
tgtgcactagtccacgtgaaac

SEQ ID NO: 1188 - DNA, 22 bp, Artificial Sequence
  Description of Artificial Sequence: Synthetic primer
tgaatgcaaagatcgcggaaac

SEQ ID NO: 1189 - DNA, 49 bp, Artificial Sequence
  Description of Artificial Sequence: Synthetic primer
  Description of Combined DNA/RNA Molecule: Synthetic primer
tgaatgcaaagatcgcggaaaccccaaatgaccctgcctggaatgcagg

SEQ ID NO: 1190 - DNA, 47 bp, Artificial Sequence
  Description of Artificial Sequence: Synthetic primer
  Description of Combined DNA/RNA Molecule: Synthetic primer
acgacgacgacgaagcagtcacacatgagatcactaaaggcauagtt

SEQ ID NO: 1191 - DNA, 46 bp, Artificial Sequence
  Description of Artificial Sequence: Synthetic primer
  Description of Combined DNA/RNA Molecule: Synthetic primer
acgacgacgacgaagccaagcagtcacacatgagatcactaaaggt

SEQ ID NO: 1192 - DNA, 51 bp, Artificial Sequence
  Description of Artificial Sequence: Synthetic primer
  Description of Combined DNA/RNA Molecule: Synthetic primer
acgacgacgacttgacgaacataatcacagctgtggtctggccttcatggc

SEQ ID NO: 1193 - DNA, 47 bp, Artificial Sequence
  Description of Artificial Sequence: Synthetic oligonucleotide
  Description of Combined DNA/RNA Molecule: Synthetic oligonucleotide
tacagatacggacgggaatcaaccatgggtgggcagaagtcaagcgc

SEQ ID NO: 1194 - DNA, 46 bp, Artificial Sequence
  Description of Artificial Sequence: Synthetic oligonucleotide
agcatgggcaccaagccagcagtgttgtttacatcctcctgcgtca

SEQ ID NO: 1195 - DNA, 27 bp, Artificial Sequence
  Description of Artificial Sequence: Synthetic probe
ttgaagtcaagcatgggcaccaagcca

SEQ ID NO: 1196 - DNA, 22 bp, Artificial Sequence
  Description of Artificial Sequence: Synthetic primer
tacagatacggacgggaatcaa

SEQ ID NO: 1197 - DNA, 22 bp, Artificial Sequence
  Description of Artificial Sequence: Synthetic primer
tgacgcaggaggatgtaaacaa

SEQ ID NO: 1198 - DNA, 49 bp, Artificial Sequence
  Description of Artificial Sequence: Synthetic primer
  Description of Combined DNA/RNA Molecule: Synthetic primer
tgacgcaggaggatgtaaacaagctgtggtctggccttcatgatgcccc

SEQ ID NO: 1199 - DNA, 42 bp, Artificial Sequence
  Description of Artificial Sequence: Synthetic primer
  Description of Combined DNA/RNA Molecule: Synthetic primer
acgacgacgacgaagtggcctcaaaggctacaggacaagggc

SEQ ID NO: 1200 - DNA, 43 bp, Artificial Sequence
  Description of Artificial Sequence: Synthetic primer
  Description of Combined DNA/RNA Molecule: Synthetic primer
acgacgacgacgaagtagaagcaagtggcctcaaaggcuacaa

SEQ ID NO: 1201 - DNA, 49 bp, Artificial Sequence
  Description of Artificial Sequence: Synthetic primer
  Description of Combined DNA/RNA Molecule: Synthetic primer
acgacgacgacttgacgaacataatggtaggcctgtgtgcctgcaccct

SEQ ID NO: 1202 - DNA, 45 bp, Artificial Sequence
  Description of Artificial Sequence: Synthetic oligonucleotide
  Description of Combined DNA/RNA Molecule: Synthetic oligonucleotide
ttggcgcaacggtttccaaaggtgaccaagtgcaggcgcaacaaa

SEQ ID NO: 1203 - DNA, 45 bp, Artificial Sequence
  Description of Artificial Sequence: Synthetic oligonucleotide
acaggtcagggaccaggccaggcttgtttacatcctcctgcgtca

SEQ ID NO: 1204 - DNA, 23 bp, Artificial Sequence
  Description of Artificial Sequence: Synthetic probe
ttaggcgcaacaggtcagggacc

SEQ ID NO: 1205 - DNA, 19 bp, Artificial Sequence
  Description of Artificial Sequence: Synthetic primer
ttggcgcaacggtttccaa

SEQ ID NO: 1206 - DNA, 22 bp, Artificial Sequence
  Description of Artificial Sequence: Synthetic primer
tgacgcaggaggatgtaaacaa

SEQ ID NO: 1207 - DNA, 43 bp, Artificial Sequence
  Description of Artificial Sequence: Synthetic primer
  Description of Combined DNA/RNA Molecule: Synthetic primer
tgacgcaggaggatgtaaacaacctgcacccctggcctggccc

SEQ ID NO: 1208 - DNA, 38 bp, Artificial Sequence
  Description of Artificial Sequence: Synthetic primer
  Description of Combined DNA/RNA Molecule: Synthetic primer
acgacgacgacgaagagggcactgggagctccautccg

SEQ ID NO: 1209 - DNA, 54 bp, Artificial Sequence
  Description of Artificial Sequence: Synthetic primer
  Description of Combined DNA/RNA Molecule: Synthetic primer
acgacgacgacttgacgaacataatctcctcagaatttccaggcctggcutggg

SEQ ID NO: 1210 - DNA, 49 bp, Artificial Sequence
  Description of Artificial Sequence: Synthetic oligonucleotide
  Description of Combined DNA/RNA Molecule: Synthetic oligonucleotide
ttcagcagcctggcatcactccaggagagctgtctaaggacgcagaatt

SEQ ID NO: 1211 - DNA, 42 bp, Artificial Sequence
  Description of Artificial Sequence: Synthetic oligonucleotide
gaaccaggtgaggaggccagggagtggagcgctaaggttgca

SEQ ID NO: 1212 - DNA, 24 bp, Artificial Sequence
  Description of Artificial Sequence: Synthetic probe
ttggacgcagaaccaggtgaggag

SEQ ID NO: 1213 - DNA, 19 bp, Artificial Sequence
  Description of Artificial Sequence: Synthetic primer
ttcagcagcctggcatcac

SEQ ID NO: 1214 - DNA, 19 bp, Artificial Sequence
  Description of Artificial Sequence: Synthetic primer
tgcaaccttagcgctccac

SEQ ID NO: 1215 - DNA, 48 bp, Artificial Sequence
  Description of Artificial Sequence: Synthetic primer
  Description of Combined DNA/RNA Molecule: Synthetic primer
tgcaaccttagcgctccaccctcagaatttccaggcctggcctggacc

SEQ ID NO: 1216 - DNA, 42 bp, Artificial Sequence
  Description of Artificial Sequence: Synthetic primer
  Description of Combined DNA/RNA Molecule: Synthetic primer
acgacgacgacgaatgataacatcccagggcaccacauattg

SEQ ID NO: 1217 - DNA, 47 bp, Artificial Sequence
  Description of Artificial Sequence: Synthetic primer
  Description of Combined DNA/RNA Molecule: Synthetic primer
acgacgacgacgaaataacatcccagggcaccacatattaaagtgag

SEQ ID NO: 1218 - DNA, 67 bp, Artificial Sequence
  Description of Artificial Sequence: Synthetic primer
  Description of Combined DNA/RNA Molecule: Synthetic primer
acgacgacgacttgacgaacataatcatttcttctgatcatttgcttgtcttatattttggggggcg

SEQ ID NO: 1219 - DNA, 47 bp, Artificial Sequence
  Description of Artificial Sequence: Synthetic oligonucleotide
  Description of Combined DNA/RNA Molecule: Synthetic oligonucleotide
ttgttcgcccgttggtcacgaaggctccacacaccacacgcaggttg

SEQ ID NO: 1220 - DNA, 49 bp, Artificial Sequence
  Description of Artificial Sequence: Synthetic oligonucleotide
ggtcagcaacatcaccaccctccacactgcgtggagcgctaaggttgca

SEQ ID NO: 1221 - DNA, 26 bp, Artificial Sequence
  Description of Artificial Sequence: Synthetic probe
ttacacgcaggtcagcaacatcacca

SEQ ID NO: 1222 - DNA, 19 bp, Artificial Sequence
  Description of Artificial Sequence: Synthetic primer
ttgttcgcccgttggtcac

SEQ ID NO: 1223 - DNA, 19 bp, Artificial Sequence
  Description of Artificial Sequence: Synthetic primer
tgcaaccttagcgctccac

SEQ ID NO: 1224 - DNA, 42 bp, Artificial Sequence
  Description of Artificial Sequence: Synthetic primer
  Description of Combined DNA/RNA Molecule: Synthetic primer
acgacgacgacgaagctcctcaagtggaggatccacagcagc

SEQ ID NO: 1225 - DNA, 37 bp, Artificial Sequence
  Description of Artificial Sequence: Synthetic primer
  Description of Combined DNA/RNA Molecule: Synthetic primer
acgacgacgacgaaacagggagggcaggctccucaaa

SEQ ID NO: 1226 - DNA, 52 bp, Artificial Sequence
  Description of Artificial Sequence: Synthetic primer
  Description of Combined DNA/RNA Molecule: Synthetic primer
acgacgacgacttgacgaacataattagcaagggcagcttctgggaagggta

SEQ ID NO: 1227 - DNA, 51 bp, Artificial Sequence
  Description of Artificial Sequence: Synthetic oligonucleotide
  Description of Combined DNA/RNA Molecule: Synthetic oligonucleotide
tatcgcatcaaatggagagcaaactgtagggtgcacaggtacttcaggtga

SEQ ID NO: 1228 - DNA, 49 bp, Artificial Sequence
  Description of Artificial Sequence: Synthetic oligonucleotide
ggtagccaccagcagaggaagcagctcttgaccgctgttatacgttgca

SEQ ID NO: 1229 - DNA, 30 bp, Artificial Sequence
  Description of Artificial Sequence: Synthetic probe
tttacttcaggtagccaccagcagaggaag

SEQ ID NO: 1230 - DNA, 22 bp, Artificial Sequence
  Description of Artificial Sequence: Synthetic primer
tatcgcatcaaatggagagcaa

SEQ ID NO: 1231 - DNA, 22 bp, Artificial Sequence
  Description of Artificial Sequence: Synthetic primer
tgcaacgtataacagcggtcaa

SEQ ID NO: 1232 - DNA, 48 bp, Artificial Sequence
  Description of Artificial Sequence: Synthetic primer
  Description of Combined DNA/RNA Molecule: Synthetic primer
tgcaacgtataacagcggtcaagcttctgggaagggtggagttgcttt

SEQ ID NO: 1233 - DNA, 39 bp, Artificial Sequence
  Description of Artificial Sequence: Synthetic primer
  Description of Combined DNA/RNA Molecule: Synthetic primer
acgacgacgacgaaagaggctttccccaacagcauctcg

SEQ ID NO: 1234 - DNA, 41 bp, Artificial Sequence
  Description of Artificial Sequence: Synthetic primer
  Description of Combined DNA/RNA Molecule: Synthetic primer
acgacgacgacgaagggctttccccaacagcatctcacagt

SEQ ID NO: 1235 - DNA, 60 bp, Artificial Sequence
  Description of Artificial Sequence: Synthetic primer
  Description of Combined DNA/RNA Molecule: Synthetic primer
acgacgacgacttgacgaacataatactgatgcttcatttattcctgtgaatggcaaacg

SEQ ID NO: 1236 - DNA, 52 bp, Artificial Sequence
  Description of Artificial Sequence: Synthetic oligonucleotide
  Description of Combined DNA/RNA Molecule: Synthetic oligonucleotide
tcctagtacctacagtgggcaagaacacagagacagccaaggattcaagatg

SEQ ID NO: 1237 - DNA, 56 bp, Artificial Sequence
  Description of Artificial Sequence: Synthetic oligonucleotide
agacaaggagctcactcactcagtttttcccaggttgaccgctgttatacgttgca

SEQ ID NO: 1238 - DNA, 35 bp, Artificial Sequence
  Description of Artificial Sequence: Synthetic probe
ttggattcaagacaaggagctcactcactcagttt

SEQ ID NO: 1239 - DNA, 22 bp, Artificial Sequence
  Description of Artificial Sequence: Synthetic primer
tcctagtacctacagtgggcaa

SEQ ID NO: 1240 - DNA, 22 bp, Artificial Sequence
  Description of Artificial Sequence: Synthetic primer
tgcaacgtataacagcggtcaa

SEQ ID NO: 1241 - DNA, 50 bp, Artificial Sequence
  Description of Artificial Sequence: Synthetic primer
  Description of Combined DNA/RNA Molecule: Synthetic primer
tgcaacgtataacagcggtcaacctgtgaatggcaaacacagcttgggag

SEQ ID NO: 1242 - DNA, 45 bp, Artificial Sequence
  Description of Artificial Sequence: Synthetic primer
  Description of Combined DNA/RNA Molecule: Synthetic primer
acgacgacgacgaacagataaaaggcacagagtgtccccaaggtt

SEQ ID NO: 1243 - DNA, 45 bp, Artificial Sequence
  Description of Artificial Sequence: Synthetic primer
  Description of Combined DNA/RNA Molecule: Synthetic primer
acgacgacgacgaaccactcccacagataaaaggcacagagtgtt

SEQ ID NO: 1244 - DNA, 54 bp, Artificial Sequence
  Description of Artificial Sequence: Synthetic primer
  Description of Combined DNA/RNA Molecule: Synthetic primer
acgacgacgacttgacgaacataatagtgtgaggtgaatactgaggagcugaaa

SEQ ID NO: 1245 - DNA, 50 bp, Artificial Sequence
  Description of Artificial Sequence: Synthetic oligonucleotide
  Description of Combined DNA/RNA Molecule: Synthetic oligonucleotide
tagtttgtcgaaagtcccacaccagcaagtgcacactcctccccacccgt

SEQ ID NO: 1246 - DNA, 46 bp, Artificial Sequence
  Description of Artificial Sequence: Synthetic oligonucleotide
cccaccactaggtccatcccagcccgtgcaaaattcaggctgtgca

SEQ ID NO: 1247 - DNA, 27 bp, Artificial Sequence
  Description of Artificial Sequence: Synthetic probe
aactccccacccaccactaggtccatc

SEQ ID NO: 1248 - DNA, 22 bp, Artificial Sequence
  Description of Artificial Sequence: Synthetic primer
tagtttgtcgaaagtcccacac

SEQ ID NO: 1249 - DNA, 21 bp, Artificial Sequence
  Description of Artificial Sequence: Synthetic primer
tgcacagcctgaattttgcac

SEQ ID NO: 1250 - DNA, 45 bp, Artificial Sequence
  Description of Artificial Sequence: Synthetic primer
  Description of Combined DNA/RNA Molecule: Synthetic primer
tgcacagcctgaattttgcactggacatggtggctgggttgggac

SEQ ID NO: 1251 - DNA, 41 bp, Artificial Sequence
  Description of Artificial Sequence: Synthetic primer
  Description of Combined DNA/RNA Molecule: Synthetic primer
acgacgacgacgaatgtccacttggatgtcccaccactgtt

SEQ ID NO: 1252 - DNA, 42 bp, Artificial Sequence
  Description of Artificial Sequence: Synthetic primer
  Description of Combined DNA/RNA Molecule: Synthetic primer
acgacgacgacgaagcatctgtccacttggatgtcccaccat

SEQ ID NO: 1253 - DNA, 50 bp, Artificial Sequence
  Description of Artificial Sequence: Synthetic primer
  Description of Combined DNA/RNA Molecule: Synthetic primer
acgacgacgacttgacgaacataatctgggtgcttctgtagaggcugaga

SEQ ID NO: 1254 - DNA, 45 bp, Artificial Sequence
  Description of Artificial Sequence: Synthetic oligonucleotide
  Description of Combined DNA/RNA Molecule: Synthetic oligonucleotide
tagacacgagcgaggtcaccagccagtgtcccctgactcacacgg

SEQ ID NO: 1255 - DNA, 53 bp, Artificial Sequence
  Description of Artificial Sequence: Synthetic oligonucleotide
cacaacacatggcacatcaaccacatcacagagtgcaaaattcaggctgtgca

SEQ ID NO: 1256 - DNA, 30 bp, Artificial Sequence
  Description of Artificial Sequence: Synthetic probe
tttgactcacacaacacatggcacatcaac

SEQ ID NO: 1257 - DNA, 19 bp, Artificial Sequence
  Description of Artificial Sequence: Synthetic primer
tagacacgagcgaggtcac

SEQ ID NO: 1258 - DNA, 21 bp, Artificial Sequence
  Description of Artificial Sequence: Synthetic primer
tgcacagcctgaattttgcac

SEQ ID NO: 1259 - DNA, 49 bp, Artificial Sequence
  Description of Artificial Sequence: Synthetic primer
  Description of Combined DNA/RNA Molecule: Synthetic primer
tgcacagcctgaattttgcacgaggcagacttcctctgtgatatggtta

SEQ ID NO: 1260 - DNA, 45 bp, Artificial Sequence
  Description of Artificial Sequence: Synthetic primer
  Description of Combined DNA/RNA Molecule: Synthetic primer
acgacgacgacgaaccaacagggtaagtaacagagccacactccc

SEQ ID NO: 1261 - DNA, 46 bp, Artificial Sequence
  Description of Artificial Sequence: Synthetic primer
  Description of Combined DNA/RNA Molecule: Synthetic primer
acgacgacgacgaataacaccaacagggtaagtaacagagccacat

SEQ ID NO: 1262 - DNA, 50 bp, Artificial Sequence
  Description of Artificial Sequence: Synthetic primer
  Description of Combined DNA/RNA Molecule: Synthetic primer
acgacgacgacttgacgaacataatcatctggcctggagtgcacagggac

SEQ ID NO: 1263 - DNA, 44 bp, Artificial Sequence
  Description of Artificial Sequence: Synthetic oligonucleotide
  Description of Combined DNA/RNA Molecule: Synthetic oligonucleotide
ttcttcacagtaccgccacagggtggtcaccaggctacauggct

SEQ ID NO: 1264 - DNA, 44 bp, Artificial Sequence
  Description of Artificial Sequence: Synthetic oligonucleotide
tggtcctcagccagcctcctgcatctgtgttgtctggtggtgca

SEQ ID NO: 1265 - DNA, 25 bp, Artificial Sequence
  Description of Artificial Sequence: Synthetic probe
ttggctacatggtcctcagccagcc

SEQ ID NO: 1266 - DNA, 20 bp, Artificial Sequence
  Description of Artificial Sequence: Synthetic primer
ttcttcacagtaccgccaca

SEQ ID NO: 1267 - DNA, 19 bp, Artificial Sequence
  Description of Artificial Sequence: Synthetic primer
tgcaccaccagacaacaca

SEQ ID NO: 1268 - DNA, 43 bp, Artificial Sequence
  Description of Artificial Sequence: Synthetic primer
  Description of Combined DNA/RNA Molecule: Synthetic primer
tgcaccaccagacaacacatggagtgcacagaggcaatggata

SEQ ID NO: 1269 - DNA, 40 bp, Artificial Sequence
  Description of Artificial Sequence: Synthetic primer
  Description of Combined DNA/RNA Molecule: Synthetic primer
acgacgacgacgaagtctagtggcagccaggcacaugaga

SEQ ID NO: 1270 - DNA, 41 bp, Artificial Sequence
  Description of Artificial Sequence: Synthetic primer
  Description of Combined DNA/RNA Molecule: Synthetic primer
acgacgacgacgaactagtggcagccaggcacatgaggagt

SEQ ID NO: 1271 - DNA, 53 bp, Artificial Sequence
  Description of Artificial Sequence: Synthetic primer
  Description of Combined DNA/RNA Molecule: Synthetic primer
acgacgacgacttgacgaacataatctgtgcatctgtgcaatgctggcutgga

SEQ ID NO: 1272 - DNA, 47 bp, Artificial Sequence
  Description of Artificial Sequence: Synthetic oligonucleotide
  Description of Combined DNA/RNA Molecule: Synthetic oligonucleotide
taccctcctagctccgtacagcaggccttgaggctgtcaccaaggat

SEQ ID NO: 1273 - DNA, 40 bp, Artificial Sequence
  Description of Artificial Sequence: Synthetic oligonucleotide
agggctcctccaccaccagcctgtgttgtctggtggtgca

SEQ ID NO: 1274 - DNA, 27 bp, Artificial Sequence
  Description of Artificial Sequence: Synthetic probe
aagtcaccaagggctcctccaccacca

SEQ ID NO: 1275 - DNA, 20 bp, Artificial Sequence
  Description of Artificial Sequence: Synthetic primer
taccctcctagctccgtaca

SEQ ID NO: 1276 - DNA, 19 bp, Artificial Sequence
  Description of Artificial Sequence: Synthetic primer
tgcaccaccagacaacaca

SEQ ID NO: 1277 - DNA, 44 bp, Artificial Sequence
  Description of Artificial Sequence: Synthetic primer
  Description of Combined DNA/RNA Molecule: Synthetic primer
tgcaccaccagacaacacagcaatgctggcttgggagttggcta

SEQ ID NO: 1278 - DNA, 38 bp, Artificial Sequence
  Description of Artificial Sequence: Synthetic primer
  Description of Combined DNA/RNA Molecule: Synthetic primer
acgacgacgacgaaggcagtgggctggagagcaugggt

SEQ ID NO: 1279 - DNA, 40 bp, Artificial Sequence
  Description of Artificial Sequence: Synthetic primer
  Description of Combined DNA/RNA Molecule: Synthetic primer
acgacgacgacgaagcatccagaggagggcagtgggctga

SEQ ID NO: 1280 - DNA, 48 bp, Artificial Sequence
  Description of Artificial Sequence: Synthetic primer
  Description of Combined DNA/RNA Molecule: Synthetic primer
acgacgacgacttgacgaacataattccttgggcaggtgggcaggtga

SEQ ID NO: 1281 - DNA, 50 bp, Artificial Sequence
  Description of Artificial Sequence: Synthetic oligonucleotide
  Description of Combined DNA/RNA Molecule: Synthetic oligonucleotide
tcatcgccctcagatcttccatgaggtgacagaatgctctgtacagggtc

SEQ ID NO: 1282 - DNA, 44 bp, Artificial Sequence
  Description of Artificial Sequence: Synthetic oligonucleotide
gggatcacaggcccccaagctgctggaggatagattggagggca

SEQ ID NO: 1283 - DNA, 28 bp, Artificial Sequence
  Description of Artificial Sequence: Synthetic probe
aactgtacagggatcacaggcccccaag

SEQ ID NO: 1284 - DNA, 21 bp, Artificial Sequence
  Description of Artificial Sequence: Synthetic primer
tcatcgccctcagatcttcca

SEQ ID NO: 1285 - DNA, 21 bp, Artificial Sequence
  Description of Artificial Sequence: Synthetic primer
tgccctccaatctatcctcca

SEQ ID NO: 1286 - DNA, 44 bp, Artificial Sequence
  Description of Artificial Sequence: Synthetic primer
  Description of Combined DNA/RNA Molecule: Synthetic primer
tgccctccaatctatcctccaaggtgggcaggtgggtatgcttc

SEQ ID NO: 1287 - DNA, 43 bp, Artificial Sequence
  Description of Artificial Sequence: Synthetic primer
  Description of Combined DNA/RNA Molecule: Synthetic primer
acgacgacgacgaagctcaggcagcaagcaatcaaacactcta

SEQ ID NO: 1288 - DNA, 39 bp, Artificial Sequence
  Description of Artificial Sequence: Synthetic primer
  Description of Combined DNA/RNA Molecule: Synthetic primer
acgacgacgacgaaggagctcaggcagcaagcaaucaag

SEQ ID NO: 1289 - DNA, 54 bp, Artificial Sequence
  Description of Artificial Sequence: Synthetic primer
  Description of Combined DNA/RNA Molecule: Synthetic primer
acgacgacgacttgacgaacataatgtcttccaatggactgggtgttgcuccta

SEQ ID NO: 1290 - DNA, 47 bp, Artificial Sequence
  Description of Artificial Sequence: Synthetic oligonucleotide
  Description of Combined DNA/RNA Molecule: Synthetic oligonucleotide
taaccagttaccaccgccagtggacactgctgaaggtgaacaagatt

SEQ ID NO: 1291 - DNA, 46 bp, Artificial Sequence
  Description of Artificial Sequence: Synthetic oligonucleotide
agaccccagggccagtcctcagtgttggaggatagattggagggca

SEQ ID NO: 1292 - DNA, 26 bp, Artificial Sequence
  Description of Artificial Sequence: Synthetic probe
ttgtgaacaagaccccagggccagtc

SEQ ID NO: 1293 - DNA, 19 bp, Artificial Sequence
  Description of Artificial Sequence: Synthetic primer
taaccagttaccaccgcca

SEQ ID NO: 1294 - DNA, 21 bp, Artificial Sequence
  Description of Artificial Sequence: Synthetic primer
tgccctccaatctatcctcca

SEQ ID NO: 1295 - DNA, 49 bp, Artificial Sequence
  Description of Artificial Sequence: Synthetic primer
  Description of Combined DNA/RNA Molecule: Synthetic primer
tgccctccaatctatcctccaccaatggactgggtgttgctcttggacg

SEQ ID NO: 1296 - DNA, 42 bp, Artificial Sequence; identical to SEQ ID NO: 119
  Description of Artificial Sequence: Synthetic primer
  Description of Combined DNA/RNA Molecule: Synthetic primer

SEQ ID NO: 1297 - DNA, 40 bp, Artificial Sequence; identical to SEQ ID NO: 120
  Description of Artificial Sequence: Synthetic primer
  Description of Combined DNA/RNA Molecule: Synthetic primer

SEQ ID NO: 1298 - DNA, 48 bp, Artificial Sequence
  Description of Artificial Sequence: Synthetic primer
  Description of Combined DNA/RNA Molecule: Synthetic primer
acgacgacgacttgacgaacataatgggctgtgctgtgctggcugcta

SEQ ID NO: 1299 - DNA, 45 bp, Artificial Sequence
  Description of Artificial Sequence: Synthetic oligonucleotide
  Description of Combined DNA/RNA Molecule: Synthetic oligonucleotide
tcgcaccggaattctgaccgacagaggcagctcctgttcagacga

SEQ ID NO: 1300 - DNA, 49 bp, Artificial Sequence
  Description of Artificial Sequence: Synthetic oligonucleotide
gacagcaaaacccacaaggcccaggagagggtagtttcccatgacggca

SEQ ID NO: 1301 - DNA, 30 bp, Artificial Sequence
  Description of Artificial Sequence: Synthetic probe
aactgttcagacagcaaaacccacaaggcc

SEQ ID NO: 1302 - DNA, 19 bp, Artificial Sequence
  Description of Artificial Sequence: Synthetic primer
tcgcaccggaattctgacc

SEQ ID NO: 1303 - DNA, 20 bp, Artificial Sequence
  Description of Artificial Sequence: Synthetic primer
tgccgtcatgggaaactacc

SEQ ID NO: 1304 - DNA, 44 bp, Artificial Sequence
  Description of Artificial Sequence: Synthetic primer
  Description of Combined DNA/RNA Molecule: Synthetic primer
tgccgtcatgggaaactaccctgtgctgtgctggctgttgctcc

SEQ ID NO: 1305 - DNA, 43 bp, Artificial Sequence
  Description of Artificial Sequence: Synthetic primer
  Description of Combined DNA/RNA Molecule: Synthetic primer
acgacgacgacgaaccctcactagataagaggccaccagctga

SEQ ID NO: 1306 - DNA, 51 bp, Artificial Sequence
  Description of Artificial Sequence: Synthetic primer
  Description of Combined DNA/RNA Molecule: Synthetic primer
acgacgacgacttgacgaacataatggagtgaggagtgaggctggcugagc

SEQ ID NO: 1307 - DNA, 45 bp, Artificial Sequence
  Description of Artificial Sequence: Synthetic oligonucleotide
  Description of Combined DNA/RNA Molecule: Synthetic oligonucleotide
ttgcacgttgtcctgcaccctggctgccagctccatggcacccgc

SEQ ID NO: 1308 - DNA, 41 bp, Artificial Sequence
  Description of Artificial Sequence: Synthetic oligonucleotide
cccatgaggtcaccccccagcggtagtttcccatgacggca

SEQ ID NO: 1309 - DNA, 23 bp, Artificial Sequence
  Description of Artificial Sequence: Synthetic probe
aacatggcacccatgaggtcacc

SEQ ID NO: 1310 - DNA, 19 bp, Artificial Sequence
  Description of Artificial Sequence: Synthetic primer
ttgcacgttgtcctgcacc

SEQ ID NO: 1311 - DNA, 20 bp, Artificial Sequence
  Description of Artificial Sequence: Synthetic primer
tgccgtcatgggaaactacc

SEQ ID NO: 1312 - DNA, 46 bp, Artificial Sequence
  Description of Artificial Sequence: Synthetic primer
  Description of Combined DNA/RNA Molecule: Synthetic primer
tgccgtcatgggaaactaccggctggctgagtcctgaggttgggag

SEQ ID NO: 1313 - DNA, 42 bp, Artificial Sequence
  Description of Artificial Sequence: Synthetic primer
  Description of Combined DNA/RNA Molecule: Synthetic primer
acgacgacgacgaagagggaggtgcacactctgtacaaggaa

SEQ ID NO: 1314 - DNA, 41 bp, Artificial Sequence
  Description of Artificial Sequence: Synthetic primer
  Description of Combined DNA/RNA Molecule: Synthetic primer
acgacgacgacgaacacaagagggaggtgcacactcugtat

SEQ ID NO: 1315 - DNA, 47 bp, Artificial Sequence
  Description of Artificial Sequence: Synthetic primer
  Description of Combined DNA/RNA Molecule: Synthetic primer
acgacgacgacttgacgaacataatggtgggagaggtgaggcctgaa

SEQ ID NO: 1316 - DNA, 45 bp, Artificial Sequence
  Description of Artificial Sequence: Synthetic oligonucleotide
  Description of Combined DNA/RNA Molecule: Synthetic oligonucleotide
tgcttacccacgatgcaccgcagcttcaggagcagagtcagcatt

SEQ ID NO: 1317 - DNA, 43 bp, Artificial Sequence
  Description of Artificial Sequence: Synthetic oligonucleotide
gcacccaccaagtcaggtgggccggtcgtatgacttgctcgca

SEQ ID NO: 1318 - DNA, 27 bp, Artificial Sequence
  Description of Artificial Sequence: Synthetic probe
ttagagtcagcacccaccaagtcaggt

SEQ ID NO: 1319 - DNA, 19 bp, Artificial Sequence
  Description of Artificial Sequence: Synthetic primer
tgcttacccacgatgcacc

SEQ ID NO: 1320 - DNA, 20 bp, Artificial Sequence
  Description of Artificial Sequence: Synthetic primer
tgcgagcaagtcatacgacc

SEQ ID NO: 1321 - DNA, 41 bp, Artificial Sequence
  Description of Artificial Sequence: Synthetic primer
  Description of Combined DNA/RNA Molecule: Synthetic primer
tgcgagcaagtcatacgaccgggagaggtgaggcttgaggt

SEQ ID NO: 1322 - DNA, 39 bp, Artificial Sequence
  Description of Artificial Sequence: Synthetic primer
  Description of Combined DNA/RNA Molecule: Synthetic primer
acgacgacgacgaagggtgcctcaactccccacautcct

SEQ ID NO: 1323 - DNA, 40 bp, Artificial Sequence
  Description of Artificial Sequence: Synthetic primer
  Description of Combined DNA/RNA Molecule: Synthetic primer
acgacgacgacgaacccactgggtgcctcaactccccacg

SEQ ID NO: 1324 - DNA, 55 bp, Artificial Sequence
  Description of Artificial Sequence: Synthetic primer
  Description of Combined DNA/RNA Molecule: Synthetic primer
acgacgacgacttgacgaacataatggtgtggagttaagagccactgagcctgga

SEQ ID NO: 1325 - DNA, 43 bp, Artificial Sequence
  Description of Artificial Sequence: Synthetic oligonucleotide
  Description of Combined DNA/RNA Molecule: Synthetic oligonucleotide
tagccgatggcgtaaaacccccactgctgcaaaggtcauggtt

SEQ ID NO: 1326 - DNA, 43 bp, Artificial Sequence
  Description of Artificial Sequence: Synthetic oligonucleotide
tggccctcacctgcacaccacacggtcgtatgacttgctcgca

SEQ ID NO: 1327 - DNA, 23 bp, Artificial Sequence
  Description of Artificial Sequence: Synthetic probe
ttaaggtcatggccctcacctgc

SEQ ID NO: 1328 - DNA, 19 bp, Artificial Sequence
  Description of Artificial Sequence: Synthetic primer
tagccgatggcgtaaaacc

SEQ ID NO: 1329 - DNA, 20 bp, Artificial Sequence
  Description of Artificial Sequence: Synthetic primer
tgcgagcaagtcatacgacc

SEQ ID NO: 1330 - DNA, 45 bp, Artificial Sequence
  Description of Artificial Sequence: Synthetic primer
  Description of Combined DNA/RNA Molecule: Synthetic primer
tgcgagcaagtcatacgaccgagccactgagcctgggtatggtgc

SEQ ID NO: 1331 - DNA, 36 bp, Artificial Sequence
  Description of Artificial Sequence: Synthetic primer
  Description of Combined DNA/RNA Molecule: Synthetic primer
acgacgacgacgaaagagcagggccagggcaagcaa

SEQ ID NO: 1332 - DNA, 42 bp, Artificial Sequence
  Description of Artificial Sequence: Synthetic primer
  Description of Combined DNA/RNA Molecule: Synthetic primer
acgacgacgacgaactctagacaagcagagcagggccagggt

SEQ ID NO: 1333 - DNA, 56 bp, Artificial Sequence
  Description of Artificial Sequence: Synthetic primer
  Description of Combined DNA/RNA Molecule: Synthetic primer
acgacgacgacttgacgaacataatgactggcccaaaatagctgtgaatgcctgta

SEQ ID NO: 1334 - DNA, 45 bp, Artificial Sequence
  Description of Artificial Sequence: Synthetic oligonucleotide
  Description of Combined DNA/RNA Molecule: Synthetic oligonucleotide
ttacaggccgcatagcaacgcaagcaagccagagtgaacaucaga

SEQ ID NO: 1335 - DNA, 47 bp, Artificial Sequence
  Description of Artificial Sequence: Synthetic oligonucleotide
tcaagtgagaggccacacacaagtcacagttgagacatgggctcgca

SEQ ID NO: 1336 - DNA, 29 bp, Artificial Sequence
  Description of Artificial Sequence: Synthetic probe
ttgtgaacatcaagtgagaggccacacac

SEQ ID NO: 1337 - DNA, 19 bp, Artificial Sequence
  Description of Artificial Sequence: Synthetic primer
ttacaggccgcatagcaac

SEQ ID NO: 1338 - DNA, 19 bp, Artificial Sequence
  Description of Artificial Sequence: Synthetic primer
tgcgagcccatgtctcaac

SEQ ID NO: 1339 - DNA, 49 bp, Artificial Sequence
  Description of Artificial Sequence: Synthetic primer
  Description of Combined DNA/RNA Molecule: Synthetic primer
tgcgagcccatgtctcaacgcccaaaatagctgtgaatgcctatgactc

SEQ ID NO: 1340 - DNA, 39 bp, Artificial Sequence
  Description of Artificial Sequence: Synthetic primer
  Description of Combined DNA/RNA Molecule: Synthetic primer
acgacgacgacgaactcaccatcccctgggcacaggccg

SEQ ID NO: 1341 - DNA, 43 bp, Artificial Sequence
  Description of Artificial Sequence: Synthetic primer
  Description of Combined DNA/RNA Molecule: Synthetic primer
acgacgacgacgaactgaggccacatctctcaccatcccctga

SEQ ID NO: 1342 - DNA, 48 bp, Artificial Sequence
  Description of Artificial Sequence: Synthetic primer
  Description of Combined DNA/RNA Molecule: Synthetic primer
acgacgacgacttgacgaacataatggctgaggcctgagtggcugcta

SEQ ID NO: 1343 - DNA, 41 bp, Artificial Sequence
  Description of Artificial Sequence: Synthetic oligonucleotide
  Description of Combined DNA/RNA Molecule: Synthetic oligonucleotide
ttcgcctaccgcagtgaaccagggaggaggaggacactctg

SEQ ID NO: 1344 - DNA, 47 bp, Artificial Sequence
  Description of Artificial Sequence: Synthetic oligonucleotide
ctccagtcatgtgcccaggactgtccccgttgagacatgggctcgca

SEQ ID NO: 1345 - DNA, 28 bp, Artificial Sequence
  Description of Artificial Sequence: Synthetic probe
ttgaggacactccagtcatgtgcccagg

SEQ ID NO: 1346 - DNA, 19 bp, Artificial Sequence
  Description of Artificial Sequence: Synthetic primer
ttcgcctaccgcagtgaac

SEQ ID NO: 1347 - DNA, 19 bp, Artificial Sequence
  Description of Artificial Sequence: Synthetic primer
tgcgagcccatgtctcaac

SEQ ID NO: 1348 - DNA, 41 bp, Artificial Sequence
  Description of Artificial Sequence: Synthetic primer
  Description of Combined DNA/RNA Molecule: Synthetic primer
tgcgagcccatgtctcaacgctgaggcctgagtgacgctga

SEQ ID NO: 1349 - DNA, 40 bp, Artificial Sequence
  Description of Artificial Sequence: Synthetic primer
  Description of Combined DNA/RNA Molecule: Synthetic primer
acgacgacgacgaaagggatgcagacacaccagcagctgt

SEQ ID NO: 1350 - DNA, 41 bp, Artificial Sequence
  Description of Artificial Sequence: Synthetic primer
  Description of Combined DNA/RNA Molecule: Synthetic primer
acgacgacgacgaactgcaagggatgcagacacaccagcaa

SEQ ID NO: 1351 - DNA, 51 bp, Artificial Sequence
  Description of Artificial Sequence: Synthetic primer
  Description of Combined DNA/RNA Molecule: Synthetic primer
acgacgacgacttgacgaacataatgagacctgtgatggaggaggcutgta

SEQ ID NO: 1352 - DNA, 48 bp, Artificial Sequence
  Description of Artificial Sequence: Synthetic oligonucleotide
  Description of Combined DNA/RNA Molecule: Synthetic oligonucleotide
ttcgcctaccgcagtgaaccaaacctgccagagtctccacccacccgt

SEQ ID NO: 1353 - DNA, 46 bp, Artificial Sequence
  Description of Artificial Sequence: Synthetic oligonucleotide
cccaccaactgtagcctccatctgcacgttgagacatgggctcgca

SEQ ID NO: 1354 - DNA, 25 bp, Artificial Sequence
  Description of Artificial Sequence: Synthetic probe
aaccacccacccaccaactgtagcc

SEQ ID NO: 1355 - DNA, 19 bp, Artificial Sequence
  Description of Artificial Sequence: Synthetic primer
ttcgcctaccgcagtgaac

SEQ ID NO: 1356 - DNA, 19 bp, Artificial Sequence
  Description of Artificial Sequence: Synthetic primer
tgcgagcccatgtctcaac

SEQ ID NO: 1357 - DNA, 42 bp, Artificial Sequence
  Description of Artificial Sequence: Synthetic primer
  Description of Combined DNA/RNA Molecule: Synthetic primer
tgcgagcccatgtctcaactgtgtggaggtgtgggatgcagg

SEQ ID NO: 1358 - DNA, 39 bp, Artificial Sequence
  Description of Artificial Sequence: Synthetic primer
  Description of Combined DNA/RNA Molecule: Synthetic primer
acgacgacgacgaacacaaaccaggccactggcagagga

SEQ ID NO: 1359 - DNA, 40 bp, Artificial Sequence
  Description of Artificial Sequence: Synthetic primer
  Description of Combined DNA/RNA Molecule: Synthetic primer
acgacgacgacgaagggagacacaaaccaggccacuggcg

SEQ ID NO: 1360 - DNA, 49 bp, Artificial Sequence
  Description of Artificial Sequence: Synthetic primer
  Description of Combined DNA/RNA Molecule: Synthetic primer
acgacgacgacttgacgaacataatggtgggcagtggctggttcuccac

SEQ ID NO: 1361 - DNA, 45 bp, Artificial Sequence
  Description of Artificial Sequence: Synthetic oligonucleotide
  Description of Combined DNA/RNA Molecule: Synthetic oligonucleotide
ttgcatttcgttagcgacacacaggaggagcacagagacaacaat

SEQ ID NO: 1362 - DNA, 41 bp, Artificial Sequence
  Description of Artificial Sequence: Synthetic oligonucleotide
acagcccccatgccagcagcctgtgagtcgatctacccgca

SEQ ID NO: 1363 - DNA, 25 bp, Artificial Sequence
  Description of Artificial Sequence: Synthetic probe
ttagagacaacagcccccatgccag

SEQ ID NO: 1364 - DNA, 21 bp, Artificial Sequence
  Description of Artificial Sequence: Synthetic primer
ttgcatttcgttagcgacaca

SEQ ID NO: 1365 - DNA, 20 bp, Artificial Sequence
  Description of Artificial Sequence: Synthetic primer
tgcgggtagatcgactcaca

SEQ ID NO: 1366 - DNA, 49 bp, Artificial Sequence
  Description of Artificial Sequence: Synthetic primer
  Description of Combined DNA/RNA Molecule: Synthetic primer
tgcgggtagatcgactcacaggctggttctccatcatgttggttgctga

SEQ ID NO: 1367 - DNA, 59 bp, Artificial Sequence
  Description of Artificial Sequence: Synthetic primer
  Description of Combined DNA/RNA Molecule: Synthetic primer
acgacgacgacgaacacacaaaaaaattggatacattttgaataaagcaattcagttct

SEQ ID NO: 1368 - DNA, 55 bp, Artificial Sequence
  Description of Artificial Sequence: Synthetic primer
  Description of Combined DNA/RNA Molecule: Synthetic primer
acgacgacgacgaattggatacattttgaataaagcaattcagttccttauccaa

SEQ ID NO: 1369 - DNA, 59 bp, Artificial Sequence
  Description of Artificial Sequence: Synthetic primer
  Description of Combined DNA/RNA Molecule: Synthetic primer
acgacgacgacttgacgaacataatccataaagccctcctactagctagtgaccctgtg

SEQ ID NO: 1370 - DNA, 46 bp, Artificial Sequence
  Description of Artificial Sequence: Synthetic oligonucleotide
  Description of Combined DNA/RNA Molecule: Synthetic oligonucleotide
ttgcatttcgttagcgacacaccagggactgggttgcttcaugtag

SEQ ID NO: 1371 - DNA, 61 bp, Artificial Sequence
  Description of Artificial Sequence: Synthetic oligonucleotide
tgtgattggccagaggagtcacatggtgaaagtaactttactgtgagtcgatctacccgca

SEQ ID NO: 1372 - DNA, 29 bp, Artificial Sequence
  Description of Artificial Sequence: Synthetic probe
aatgcttcatgtgattggccagaggagtc

SEQ ID NO: 1373 - DNA, 21 bp, Artificial Sequence
  Description of Artificial Sequence: Synthetic primer
ttgcatttcgttagcgacaca

SEQ ID NO: 1374 - DNA, 20 bp, Artificial Sequence
  Description of Artificial Sequence: Synthetic primer
tgcgggtagatcgactcaca

SEQ ID NO: 1375 - DNA, 37 bp, Artificial Sequence
  Description of Artificial Sequence: Synthetic primer
  Description of Combined DNA/RNA Molecule: Synthetic primer
acgacgacgacgaacctggaggtgccaaggcagcccc

SEQ ID NO: 1376 - DNA, 37 bp, Artificial Sequence
  Description of Artificial Sequence: Synthetic primer
  Description of Combined DNA/RNA Molecule: Synthetic primer
acgacgacgacgaaccaaggcagccctgggaaagaga

SEQ ID NO: 1377 - DNA, 48 bp, Artificial Sequence
  Description of Artificial Sequence: Synthetic primer
  Description of Combined DNA/RNA Molecule: Synthetic primer
acgacgacgacttgacgaacataatggtggaggtggaggtgtguggcc

SEQ ID NO: 1378 - DNA, 51 bp, Artificial Sequence
  Description of Artificial Sequence: Synthetic oligonucleotide
  Description of Combined DNA/RNA Molecule: Synthetic oligonucleotide
taccactcatcttctgcgacagcacagatttcaagggagggacccagagcc

SEQ ID NO: 1379 - DNA, 60 bp, Artificial Sequence
  Description of Artificial Sequence: Synthetic oligonucleotide
gagttaacagatctgatccttccaagcctgcagtctctagtgtgagtcgatctacccgca

SEQ ID NO: 1380 - DNA, 35 bp, Artificial Sequence
  Description of Artificial Sequence: Synthetic probe
ttggacccagagttaacagatctgatccttccaag

SEQ ID NO: 1381 - DNA, 21 bp, Artificial Sequence
  Description of Artificial Sequence: Synthetic primer
taccactcatcttctgcgaca

SEQ ID NO: 1382 - DNA, 20 bp, Artificial Sequence
  Description of Artificial Sequence: Synthetic primer
tgcgggtagatcgactcaca

SEQ ID NO: 1383 - DNA, 42 bp, Artificial Sequence
  Description of Artificial Sequence: Synthetic primer
  Description of Combined DNA/RNA Molecule: Synthetic primer
tgcgggtagatcgactcacatggaggtggaggtgtatggctg

SEQ ID NO: 1384 - DNA, 45 bp, Artificial Sequence
  Description of Artificial Sequence: Synthetic primer
  Description of Combined DNA/RNA Molecule: Synthetic primer
acgacgacgacgaacaggaaagctgggaggttcaactacaggcag

SEQ ID NO: 1385 - DNA, 54 bp, Artificial Sequence
  Description of Artificial Sequence: Synthetic primer
  Description of Combined DNA/RNA Molecule: Synthetic primer
acgacgacgacttgacgaacataatagtgctgggattacaggtgtgagcugcta

SEQ ID NO: 1386 - DNA, 53 bp, Artificial Sequence
  Description of Artificial Sequence: Synthetic oligonucleotide
  Description of Combined DNA/RNA Molecule: Synthetic oligonucleotide
tctcatgggcgctagtatcaacgcaagaaaattgaggcactttccgcaucttc

SEQ ID NO: 1387 - DNA, 59 bp, Artificial Sequence
  Description of Artificial Sequence: Synthetic oligonucleotide
tctctcccaaaaataaaagaaaggatgccaggcacaggtttccctgattgatacccgca

SEQ ID NO: 1388 - DNA, 37 bp, Artificial Sequence
  Description of Artificial Sequence: Synthetic probe
ccttccgcatctctcccaaaaataaaagaaaggatgc

SEQ ID NO: 1389 - DNA, 22 bp, Artificial Sequence
  Description of Artificial Sequence: Synthetic primer
tctcatgggcgctagtatcaac

SEQ ID NO: 1390 - DNA, 22 bp, Artificial Sequence
  Description of Artificial Sequence: Synthetic primer
tgcgggtatcaatcagggaaac

SEQ ID NO: 1391 - DNA, 46 bp, Artificial Sequence
  Description of Artificial Sequence: Synthetic primer
  Description of Combined DNA/RNA Molecule: Synthetic primer
tgcgggtatcaatcagggaaacggtgtgagctgctgtgcttggcac

SEQ ID NO: 1392 - DNA, 37 bp, Artificial Sequence
  Description of Artificial Sequence: Synthetic primer
  Description of Combined DNA/RNA Molecule: Synthetic primer
acgacgacgacgaaacccaggaggcaaccacaagcct

SEQ ID NO: 1393 - DNA, 40 bp, Artificial Sequence
  Description of Artificial Sequence: Synthetic primer
  Description of Combined DNA/RNA Molecule: Synthetic primer
acgacgacgacgaagggcaaccacaagccctctgaggcct

SEQ ID NO: 1394 - DNA, 49 bp, Artificial Sequence
  Description of Artificial Sequence: Synthetic primer
  Description of Combined DNA/RNA Molecule: Synthetic primer
acgacgacgacttgacgaacataattctgcccactgtccctgcccaccg

SEQ ID NO: 1395 - DNA, 48 bp, Artificial Sequence
  Description of Artificial Sequence: Synthetic oligonucleotide
  Description of Combined DNA/RNA Molecule: Synthetic oligonucleotide
tggatcgagacggaatgcaactgggtgtgagaggtcacatacacccct

SEQ ID NO: 1396 - DNA, 44 bp, Artificial Sequence
  Description of Artificial Sequence: Synthetic oligonucleotide
ccccctggcaccaggtccactggtttccctgattgatacccgca

SEQ ID NO: 1397 - DNA, 24 bp, Artificial Sequence
  Description of Artificial Sequence: Synthetic probe
aaacatacaccccctggcaccagg

SEQ ID NO: 1398 - DNA, 21 bp, Artificial Sequence
  Description of Artificial Sequence: Synthetic primer
tggatcgagacggaatgcaac

SEQ ID NO: 1399 - DNA, 22 bp, Artificial Sequence
  Description of Artificial Sequence: Synthetic primer
tgcgggtatcaatcagggaaac

SEQ ID NO: 1400 - DNA, 45 bp, Artificial Sequence
  Description of Artificial Sequence: Synthetic primer
  Description of Combined DNA/RNA Molecule: Synthetic primer
tgcgggtatcaatcagggaaaccccaccaccctgcccaatggact

SEQ ID NO: 1401 - DNA, 37 bp, Artificial Sequence
  Description of Artificial Sequence: Synthetic primer
  Description of Combined DNA/RNA Molecule: Synthetic primer
acgacgacgacgaaccctgctgggcagtcccaaatat

SEQ ID NO: 1402 - DNA, 53 bp, Artificial Sequence
  Description of Artificial Sequence: Synthetic primer
  Description of Combined DNA/RNA Molecule: Synthetic primer
acgacgacgacttgacgaacataatcccccctggtttcttgtcactccctgaa

SEQ ID NO: 1403 - DNA, 55 bp, Artificial Sequence
  Description of Artificial Sequence: Synthetic oligonucleotide
  Description of Combined DNA/RNA Molecule: Synthetic oligonucleotide
tcctgagggacaaatacacaccaatacccattattttggaggcacacgcaggcct

SEQ ID NO: 1404 - DNA, 50 bp, Artificial Sequence
  Description of Artificial Sequence: Synthetic oligonucleotide
ggctcatgctctgagttcctggaaggaggggtaggtaaggaagtcacgca

SEQ ID NO: 1405 - DNA, 26 bp, Artificial Sequence
  Description of Artificial Sequence: Synthetic probe
ttacacgcaggctcatgctctgagtt

SEQ ID NO: 1406 - DNA, 22 bp, Artificial Sequence
  Description of Artificial Sequence: Synthetic primer
tcctgagggacaaatacacacc

SEQ ID NO: 1407 - DNA, 21 bp, Artificial Sequence
  Description of Artificial Sequence: Synthetic primer
tgcgtgacttccttacctacc

SEQ ID NO: 1408 - DNA, 49 bp, Artificial Sequence
  Description of Artificial Sequence: Synthetic primer
  Description of Combined DNA/RNA Molecule: Synthetic primer
tgcgtgacttccttacctacccccctggtttcttgtcactccttgaggt

SEQ ID NO: 1409 - DNA, 41 bp, Artificial Sequence
  Description of Artificial Sequence: Synthetic primer
  Description of Combined DNA/RNA Molecule: Synthetic primer
acgacgacgacgaaacacccttctcctaggaggccagaatc

SEQ ID NO: 1410 - DNA, 44 bp, Artificial Sequence
  Description of Artificial Sequence: Synthetic primer
  Description of Combined DNA/RNA Molecule: Synthetic primer
acgacgacgacgaaggagtgagcagacacccttctcctaggaga

SEQ ID NO: 1411 - DNA, 50 bp, Artificial Sequence
  Description of Artificial Sequence: Synthetic primer
  Description of Combined DNA/RNA Molecule: Synthetic primer
acgacgacgacttgacgaacataatctggcccttgcaatggtggtggtga

SEQ ID NO: 1412 - DNA, 44 bp, Artificial Sequence
  Description of Artificial Sequence: Synthetic oligonucleotide
  Description of Combined DNA/RNA Molecule: Synthetic oligonucleotide
ttgcaacaggctaccgaccccatctcccaccagggttcagctaa

SEQ ID NO: 1413 - DNA, 47 bp, Artificial Sequence
  Description of Artificial Sequence: Synthetic oligonucleotide
gctggccagaggcaagcttcaagaccggtaggtaaggaagtcacgca

SEQ ID NO: 1414 - DNA, 22 bp, Artificial Sequence
  Description of Artificial Sequence: Synthetic probe
ttgggttcagctggccagaggc

SEQ ID NO: 1415 - DNA, 19 bp, Artificial Sequence
  Description of Artificial Sequence: Synthetic primer
ttgcaacaggctaccgacc

SEQ ID NO: 1416 - DNA, 21 bp, Artificial Sequence
  Description of Artificial Sequence: Synthetic primer
tgcgtgacttccttacctacc

SEQ ID NO: 1417 - DNA, 46 bp, Artificial Sequence
  Description of Artificial Sequence: Synthetic primer
  Description of Combined DNA/RNA Molecule: Synthetic primer
tgcgtgacttccttacctaccggtggttggtggagggtcctgaagt

SEQ ID NO: 1418 - DNA, 40 bp, Artificial Sequence
  Description of Artificial Sequence: Synthetic primer
  Description of Combined DNA/RNA Molecule: Synthetic primer
acgacgacgacgaacccctcactcagggaatcccagggat

SEQ ID NO: 1419 - DNA, 38 bp, Artificial Sequence
  Description of Artificial Sequence: Synthetic primer
  Description of Combined DNA/RNA Molecule: Synthetic primer
acgacgacgacgaagggcccctcactcagggaaucccg

SEQ ID NO: 1420 - DNA, 61 bp, Artificial Sequence
  Description of Artificial Sequence: Synthetic primer
  Description of Combined DNA/RNA Molecule: Synthetic primer
acgacgacgacttgacgaacataatggctaggcatccagattaaatcttggtttaaaggac

SEQ ID NO: 1421 - DNA, 50 bp, Artificial Sequence
  Description of Artificial Sequence: Synthetic oligonucleotide
  Description of Combined DNA/RNA Molecule: Synthetic oligonucleotide
taagcctgcttttccgaaacaacagggaagtaagatgccaggtcacctgt

SEQ ID NO: 1422 - DNA, 51 bp, Artificial Sequence
  Description of Artificial Sequence: Synthetic oligonucleotide
cctaccttctccaccccatagcccattccattgtattgcgccaggatagca

SEQ ID NO: 1423 - DNA, 30 bp, Artificial Sequence
  Description of Artificial Sequence: Synthetic probe
ttcaggtcacctaccttctccaccccatag

SEQ ID NO: 1424 - DNA, 22 bp, Artificial Sequence
  Description of Artificial Sequence: Synthetic primer
taagcctgcttttccgaaacaa

SEQ ID NO: 1425 - DNA, 21 bp, Artificial Sequence
  Description of Artificial Sequence: Synthetic primer
tgctatcctggcgcaatacaa

SEQ ID NO: 1426 - DNA, 64 bp, Artificial Sequence
  Description of Artificial Sequence: Synthetic primer
  Description of Combined DNA/RNA Molecule: Synthetic primer
tgctatcctggcgcaatacaacatccagattaaatcttggtttaaaggatttttggagtgggcc

SEQ ID NO: 1427 - DNA, 39 bp, Artificial Sequence
  Description of Artificial Sequence: Synthetic primer
  Description of Combined DNA/RNA Molecule: Synthetic primer
acgacgacgacgaagcagcagtgaggccaggtcactccc

SEQ ID NO: 1428 - DNA, 37 bp, Artificial Sequence
  Description of Artificial Sequence: Synthetic primer
  Description of Combined DNA/RNA Molecule: Synthetic primer
acgacgacgacgaagcagcagcagtgaggccaggtcg

SEQ ID NO: 1429 - DNA, 52 bp, Artificial Sequence
  Description of Artificial Sequence: Synthetic primer
  Description of Combined DNA/RNA Molecule: Synthetic primer
acgacgacgacttgacgaacataatagcattgtggctttggctgcaacaggc

SEQ ID NO: 1430 - DNA, 45 bp, Artificial Sequence
  Description of Artificial Sequence: Synthetic oligonucleotide
  Description of Combined DNA/RNA Molecule: Synthetic oligonucleotide
ttggcaactctccacccaaacactccccaccctttcatcaccttt

SEQ ID NO: 1431 - DNA, 42 bp, Artificial Sequence
  Description of Artificial Sequence: Synthetic oligonucleotide
cctccacccccaagccaagccttgtattgcgccaggatagca

SEQ ID NO: 1432 - DNA, 24 bp, Artificial Sequence
  Description of Artificial Sequence: Synthetic probe
aattcatcacctccacccccaagc

SEQ ID NO: 1433 - DNA, 19 bp, Artificial Sequence
  Description of Artificial Sequence: Synthetic primer
ttggcaactctccacccaa

SEQ ID NO: 1434 - DNA, 21 bp, Artificial Sequence
  Description of Artificial Sequence: Synthetic primer
tgctatcctggcgcaatacaa

SEQ ID NO: 1435 - DNA, 46 bp, Artificial Sequence
  Description of Artificial Sequence: Synthetic primer
  Description of Combined DNA/RNA Molecule: Synthetic primer
tgctatcctggcgcaatacaactgcaacaggtggtgggcctggctc

SEQ ID NO: 1436 - DNA, 40 bp, Artificial Sequence
  Description of Artificial Sequence: Synthetic primer
  Description of Combined DNA/RNA Molecule: Synthetic primer
acgacgacgacgaaggagctggcagagggcattcauccta

SEQ ID NO: 1437 - DNA, 38 bp, Artificial Sequence
  Description of Artificial Sequence: Synthetic primer
  Description of Combined DNA/RNA Molecule: Synthetic primer
acgacgacgacgaagagcccaggagctggcagagggcg

SEQ ID NO: 1438 - DNA, 47 bp, Artificial Sequence
  Description of Artificial Sequence: Synthetic primer
  Description of Combined DNA/RNA Molecule: Synthetic primer
acgacgacgacttgacgaacataatctggccctgccctgggagccta

SEQ ID NO: 1439 - DNA, 49 bp, Artificial Sequence
  Description of Artificial Sequence: Synthetic oligonucleotide
  Description of Combined DNA/RNA Molecule: Synthetic oligonucleotide
tcgacgaatctgctcagacaactgcacttgctcccatcaggccacccga

SEQ ID NO: 1440 - DNA, 43 bp, Artificial Sequence
  Description of Artificial Sequence: Synthetic oligonucleotide
cccagcttcaccagacccacaggcttgaagcagcgtctgagca

SEQ ID NO: 1441 - DNA, 24 bp, Artificial Sequence
  Description of Artificial Sequence: Synthetic probe
cccaggccacccagcttcaccaga

SEQ ID NO: 1442 - DNA, 21 bp, Artificial Sequence
  Description of Artificial Sequence: Synthetic primer
tcgacgaatctgctcagacaa

SEQ ID NO: 1443 - DNA, 19 bp, Artificial Sequence
  Description of Artificial Sequence: Synthetic primer
tgctcagacgctgcttcaa

SEQ ID NO: 1444 - DNA, 42 bp, Artificial Sequence
  Description of Artificial Sequence: Synthetic primer
  Description of Combined DNA/RNA Molecule: Synthetic primer
tgctcagacgctgcttcaacctgccctgggagcctatgggtt

SEQ ID NO: 1445 - DNA, 43 bp, Artificial Sequence
  Description of Artificial Sequence: Synthetic primer
  Description of Combined DNA/RNA Molecule: Synthetic primer
acgacgacgacgaaacagggtcactgagctccaattcaaaggc

SEQ ID NO: 1446 - DNA, 41 bp, Artificial Sequence
  Description of Artificial Sequence: Synthetic primer
  Description of Combined DNA/RNA Molecule: Synthetic primer
acgacgacgacgaaccacagggtcactgagctccaautcag

SEQ ID NO: 1447 - DNA, 49 bp, Artificial Sequence
  Description of Artificial Sequence: Synthetic primer
  Description of Combined DNA/RNA Molecule: Synthetic primer
acgacgacgacttgacgaacataatcctgaggctgtggtgaaccutgaa

SEQ ID NO: 1448 - DNA, 47 bp, Artificial Sequence
  Description of Artificial Sequence: Synthetic oligonucleotide
  Description of Combined DNA/RNA Molecule: Synthetic oligonucleotide
tcgacgaatctgctcagacaacagcacctgtagttgccaacaugcca

SEQ ID NO: 1449 - DNA, 43 bp, Artificial Sequence
  Description of Artificial Sequence: Synthetic oligonucleotide
tgctgaggccccacaaagatcagcttgaagcagcgtctgagca

SEQ ID NO: 1450 - DNA, 24 bp, Artificial Sequence
  Description of Artificial Sequence: Synthetic probe
aagccaacatgctgaggccccaca

SEQ ID NO: 1451 - DNA, 21 bp, Artificial Sequence
  Description of Artificial Sequence: Synthetic primer
tcgacgaatctgctcagacaa

SEQ ID NO: 1452 - DNA, 19 bp, Artificial Sequence
  Description of Artificial Sequence: Synthetic primer
tgctcagacgctgcttcaa

SEQ ID NO: 1453 - DNA, 45 bp, Artificial Sequence
  Description of Artificial Sequence: Synthetic primer
  Description of Combined DNA/RNA Molecule: Synthetic primer
tgctcagacgctgcttcaacctgaggctgtggtgaaccctgagcc

SEQ ID NO: 1454 - DNA, 43 bp, Artificial Sequence
  Description of Artificial Sequence: Synthetic primer
  Description of Combined DNA/RNA Molecule: Synthetic primer
acgacgacgacgaattgtgcagagagttggtacctgcactgaa

SEQ ID NO: 1455 - DNA, 45 bp, Artificial Sequence
  Description of Artificial Sequence: Synthetic primer
  Description of Combined DNA/RNA Molecule: Synthetic primer
acgacgacgacgaaggaaagttgtgcagagagttggtaccugcat

SEQ ID NO: 1456 - DNA, 52 bp, Artificial Sequence
  Description of Artificial Sequence: Synthetic primer
  Description of Combined DNA/RNA Molecule: Synthetic primer
acgacgacgacttgacgaacataatgctgctgttgtcaggtatggcccaggc

SEQ ID NO: 1457 - DNA, 45 bp, Artificial Sequence
  Description of Artificial Sequence: Synthetic oligonucleotide
  Description of Combined DNA/RNA Molecule: Synthetic oligonucleotide
tttccgccgctacaaccaaggctggcactgtcactactcaugctg

SEQ ID NO: 1458 - DNA, 39 bp, Artificial Sequence
  Description of Artificial Sequence: Synthetic oligonucleotide
tgccaccagtgccagcagccttgaagcagcgtctgagca

SEQ ID NO: 1459 - DNA, 26 bp, Artificial Sequence
  Description of Artificial Sequence: Synthetic probe
ttctactcatgccaccagtgccagca

SEQ ID NO: 1460 - DNA, 19 bp, Artificial Sequence
  Description of Artificial Sequence: Synthetic primer
tttccgccgctacaaccaa

SEQ ID NO: 1461 - DNA, 19 bp, Artificial Sequence
  Description of Artificial Sequence: Synthetic primer
tgctcagacgctgcttcaa

SEQ ID NO: 1462 - DNA, 44 bp, Artificial Sequence
  Description of Artificial Sequence: Synthetic primer
  Description of Combined DNA/RNA Molecule: Synthetic primer
tgctcagacgctgcttcaatatggcccaggtgtggtgatggcta

SEQ ID NO: 1463 - DNA, 37 bp, Artificial Sequence
  Description of Artificial Sequence: Synthetic primer
  Description of Combined DNA/RNA Molecule: Synthetic primer
acgacgacgacgaaggcaccaagcagctggcagtgct

SEQ ID NO: 1464 - DNA, 38 bp, Artificial Sequence
  Description of Artificial Sequence: Synthetic primer
  Description of Combined DNA/RNA Molecule: Synthetic primer
acgacgacgacgaacagcagggcaccaagcagcuggcg

SEQ ID NO: 1465 - DNA, 48 bp, Artificial Sequence
  Description of Artificial Sequence: Synthetic primer
  Description of Combined DNA/RNA Molecule: Synthetic primer
acgacgacgacttgacgaacataatgcctgcccctggtgacacuttta

SEQ ID NO: 1466 - DNA, 46 bp, Artificial Sequence
  Description of Artificial Sequence: Synthetic oligonucleotide
  Description of Combined DNA/RNA Molecule: Synthetic oligonucleotide
tcagtgaaaacacatccacccaagatggaggcagtggcgcaggctt

SEQ ID NO: 1467 - DNA, 39 bp, Artificial Sequence
  Description of Artificial Sequence: Synthetic oligonucleotide
ggcccatggtgggctgcaggtggtgagcagggatgagca

SEQ ID NO: 1468 - DNA, 20 bp, Artificial Sequence
  Description of Artificial Sequence: Synthetic probe
tttggcgcaggcccatggtg

SEQ ID NO: 1469 - DNA, 22 bp, Artificial Sequence
  Description of Artificial Sequence: Synthetic primer
tcagtgaaaacacatccaccca

SEQ ID NO: 1470 - DNA, 19 bp, Artificial Sequence
  Description of Artificial Sequence: Synthetic primer
tgctcatccctgctcacca

SEQ ID NO: 1471 - DNA, 40 bp, Artificial Sequence
  Description of Artificial Sequence: Synthetic primer
  Description of Combined DNA/RNA Molecule: Synthetic primer
tgctcatccctgctcaccatgggcctgggccacttgcagt

SEQ ID NO: 1472 - DNA, 36 bp, Artificial Sequence
  Description of Artificial Sequence: Synthetic primer
  Description of Combined DNA/RNA Molecule: Synthetic primer
acgacgacgacgaacaccccacagcccaccaattga

SEQ ID NO: 1473 - DNA, 35 bp, Artificial Sequence
  Description of Artificial Sequence: Synthetic primer
  Description of Combined DNA/RNA Molecule: Synthetic primer
acgacgacgacgaagccccaccccacagcccaccg

SEQ ID NO: 1474 - DNA, 52 bp, Artificial Sequence
  Description of Artificial Sequence: Synthetic primer
  Description of Combined DNA/RNA Molecule: Synthetic primer
acgacgacgacttgacgaacataatcagtttccagggctgcatgacagtgga

SEQ ID NO: 1475 - DNA, 40 bp, Artificial Sequence
  Description of Artificial Sequence: Synthetic oligonucleotide
  Description of Combined DNA/RNA Molecule: Synthetic oligonucleotide
tcgtagactcgctatcgccagccccagccacctcagcatc

SEQ ID NO: 1476 - DNA, 55 bp, Artificial Sequence
  Description of Artificial Sequence: Synthetic oligonucleotide
gcactaagactcaatttcacactacacacccaggcctggtgagcagggatgagca

SEQ ID NO: 1477 - DNA, 35 bp, Artificial Sequence
  Description of Artificial Sequence: Synthetic probe
ttcacctcagcactaagactcaatttcacactaca

SEQ ID NO: 1478 - DNA, 20 bp, Artificial Sequence
  Description of Artificial Sequence: Synthetic primer
tcgtagactcgctatcgcca

SEQ ID NO: 1479 - DNA, 19 bp, Artificial Sequence
  Description of Artificial Sequence: Synthetic primer
tgctcatccctgctcacca

SEQ ID NO: 1480 - DNA, 41 bp, Artificial Sequence
  Description of Artificial Sequence: Synthetic primer
  Description of Combined DNA/RNA Molecule: Synthetic primer
tgctcatccctgctcaccagtgggtgtggcctggatgtgtg

SEQ ID NO: 1481 - DNA, 38 bp, Artificial Sequence
  Description of Artificial Sequence: Synthetic primer
  Description of Combined DNA/RNA Molecule: Synthetic primer
acgacgacgacgaagctgctgcactgcagcacagacct

SEQ ID NO: 1482 - DNA, 41 bp, Artificial Sequence
  Description of Artificial Sequence: Synthetic primer
  Description of Combined DNA/RNA Molecule: Synthetic primer
acgacgacgacgaaggcagtagaggagctgctgcacugcaa

SEQ ID NO: 1483 - DNA, 51 bp, Artificial Sequence
  Description of Artificial Sequence: Synthetic primer
  Description of Combined DNA/RNA Molecule: Synthetic primer
acgacgacgacttgacgaacataatcaatgcaggctgtgtgggtgcugggt

SEQ ID NO: 1484 - DNA, 50 bp, Artificial Sequence
  Description of Artificial Sequence: Synthetic oligonucleotide
  Description of Combined DNA/RNA Molecule: Synthetic oligonucleotide
ttgcacccgcgacataaccccctaatttggtgctagaggacaacacagtg

SEQ ID NO: 1485 - DNA, 45 bp, Artificial Sequence
  Description of Artificial Sequence: Synthetic oligonucleotide
cagcagctgtgcacttggcagccggtaattcactcgaacggagca

SEQ ID NO: 1486 - DNA, 27 bp, Artificial Sequence
  Description of Artificial Sequence: Synthetic probe
ttgacaacacagcagctgtgcacttgg

SEQ ID NO: 1487 - DNA, 19 bp, Artificial Sequence
  Description of Artificial Sequence: Synthetic primer
ttgcacccgcgacataacc

SEQ ID NO: 1488 - DNA, 22 bp, Artificial Sequence
  Description of Artificial Sequence: Synthetic primer
tgctccgttcgagtgaattacc

SEQ ID NO: 1489 - DNA, 44 bp, Artificial Sequence
  Description of Artificial Sequence: Synthetic primer
  Description of Combined DNA/RNA Molecule: Synthetic primer
tgctccgttcgagtgaattaccggtgctgggctctggttgccag

SEQ ID NO: 1490 - DNA, 39 bp, Artificial Sequence
  Description of Artificial Sequence: Synthetic primer
  Description of Combined DNA/RNA Molecule: Synthetic primer
acgacgacgacgaatgctgcccaccatccacacactcag

SEQ ID NO: 1491 - DNA, 37 bp, Artificial Sequence
  Description of Artificial Sequence: Synthetic primer
  Description of Combined DNA/RNA Molecule: Synthetic primer
acgacgacgacgaagccctgctgcccaccatccacat

SEQ ID NO: 1492 - DNA, 51 bp, Artificial Sequence
  Description of Artificial Sequence: Synthetic primer
  Description of Combined DNA/RNA Molecule: Synthetic primer
acgacgacgacttgacgaacataatgggagctggtgtgttggttgggggta

SEQ ID NO: 1493 - DNA, 43 bp, Artificial Sequence
  Description of Artificial Sequence: Synthetic oligonucleotide
  Description of Combined DNA/RNA Molecule: Synthetic oligonucleotide
tccggcctttgacgatacccaagccaccaggccaaacagactc

SEQ ID NO: 1494 - DNA, 54 bp, Artificial Sequence
  Description of Artificial Sequence: Synthetic oligonucleotide
gacctcctctacaccaccaattcacccaacttggtaattcactcgaacggagca

SEQ ID NO: 1495 - DNA, 34 bp, Artificial Sequence
  Description of Artificial Sequence: Synthetic probe
ttccaaacagacctcctctacaccaccaattcac

SEQ ID NO: 1496 - DNA, 19 bp, Artificial Sequence
  Description of Artificial Sequence: Synthetic primer
tccggcctttgacgatacc

SEQ ID NO: 1497 - DNA, 22 bp, Artificial Sequence
  Description of Artificial Sequence: Synthetic primer
tgctccgttcgagtgaattacc

SEQ ID NO: 1498 - DNA, 49 bp, Artificial Sequence
  Description of Artificial Sequence: Synthetic primer
  Description of Combined DNA/RNA Molecule: Synthetic primer
tgctccgttcgagtgaattaccgttggttgagggtgcagaagctgggta

SEQ ID NO: 1499 - DNA, 46 bp, Artificial Sequence
  Description of Artificial Sequence: Synthetic primer
  Description of Combined DNA/RNA Molecule: Synthetic primer
acgacgacgacgaaggtggcagcccttgataactaatctcaggcat

SEQ ID NO: 1500 - DNA, 57 bp, Artificial Sequence
  Description of Artificial Sequence: Synthetic primer
  Description of Combined DNA/RNA Molecule: Synthetic primer
acgacgacgacttgacgaacataatcattgcctcctgcttgtcaccaaatacacagt

SEQ ID NO: 1501 - DNA, 53 bp, Artificial Sequence
  Description of Artificial Sequence: Synthetic oligonucleotide
  Description of Combined DNA/RNA Molecule: Synthetic oligonucleotide
tccggcctttgacgataccccagccacttctgtaagcttaaggaggcaacaga

SEQ ID NO: 1502 - DNA, 45 bp, Artificial Sequence
  Description of Artificial Sequence: Synthetic oligonucleotide
acaaggagaggcagaggaagtgcggtaattcactcgaacggagca

SEQ ID NO: 1503 - DNA, 29 bp, Artificial Sequence
  Description of Artificial Sequence: Synthetic probe
ttggaggcaacaaggagaggcagaggaag

SEQ ID NO: 1504 - DNA, 19 bp, Artificial Sequence
  Description of Artificial Sequence: Synthetic primer
tccggcctttgacgatacc

SEQ ID NO: 1505 - DNA, 22 bp, Artificial Sequence
  Description of Artificial Sequence: Synthetic primer
tgctccgttcgagtgaattacc

SEQ ID NO: 1506 - DNA, 47 bp, Artificial Sequence
  Description of Artificial Sequence: Synthetic primer
  Description of Combined DNA/RNA Molecule: Synthetic primer
tgctccgttcgagtgaattaccccccttccccacctggtggtgcacc

SEQ ID NO: 1507 - DNA, 39 bp, Artificial Sequence
  Description of Artificial Sequence: Synthetic primer
  Description of Combined DNA/RNA Molecule: Synthetic primer
acgacgacgacgaagctgggctctggccagatcacaggt

SEQ ID NO: 1508 - DNA, 37 bp, Artificial Sequence
  Description of Artificial Sequence: Synthetic primer
  Description of Combined DNA/RNA Molecule: Synthetic primer
acgacgacgacgaaggctgggctctggccagaucacg

SEQ ID NO: 1509 - DNA, 51 bp, Artificial Sequence
  Description of Artificial Sequence: Synthetic primer
  Description of Combined DNA/RNA Molecule: Synthetic primer
acgacgacgacttgacgaacataatcctgaggtagtgggtgcttccagcta

SEQ ID NO: 1510 - DNA, 46 bp, Artificial Sequence
  Description of Artificial Sequence: Synthetic oligonucleotide
  Description of Combined DNA/RNA Molecule: Synthetic oligonucleotide
tcgcggaaagtcccagtaacggcagtctttgaccccccgcaccttt

SEQ ID NO: 1511 - DNA, 42 bp, Artificial Sequence
  Description of Artificial Sequence: Synthetic oligonucleotide
cctcccacccacagccagagccgttggcctgtaagcgttcca

SEQ ID NO: 1512 - DNA, 19 bp, Artificial Sequence
  Description of Artificial Sequence: Synthetic probe
ttccccgcacctcccaccc

SEQ ID NO: 1513 - DNA, 20 bp, Artificial Sequence
  Description of Artificial Sequence: Synthetic primer
tcgcggaaagtcccagtaac

SEQ ID NO: 1514 - DNA, 20 bp, Artificial Sequence
  Description of Artificial Sequence: Synthetic primer
tggaacgcttacaggccaac

SEQ ID NO: 1515 - DNA, 44 bp, Artificial Sequence
  Description of Artificial Sequence: Synthetic primer
  Description of Combined DNA/RNA Molecule: Synthetic primer
tggaacgcttacaggccaaccttccagctgctgggctttggcta

SEQ ID NO: 1516 - DNA, 39 bp, Artificial Sequence
  Description of Artificial Sequence: Synthetic primer
  Description of Combined DNA/RNA Molecule: Synthetic primer
acgacgacgacgaacctgtcacactcccaccccagtccc

SEQ ID NO: 1517 - DNA, 41 bp, Artificial Sequence
  Description of Artificial Sequence: Synthetic primer
  Description of Combined DNA/RNA Molecule: Synthetic primer
acgacgacgacgaaaacacaggccctgtcacactcccacct

SEQ ID NO: 1518 - DNA, 49 bp, Artificial Sequence
  Description of Artificial Sequence: Synthetic primer
  Description of Combined DNA/RNA Molecule: Synthetic primer
acgacgacgacttgacgaacataatgggagagctgtggtggcccctgga

SEQ ID NO: 1519 - DNA, 48 bp, Artificial Sequence
  Description of Artificial Sequence: Synthetic oligonucleotide
  Description of Combined DNA/RNA Molecule: Synthetic oligonucleotide
tgaacgctcaaacacgtgaactcctgcacagccccaaagtccaccaaa

SEQ ID NO: 1520 - DNA, 39 bp, Artificial Sequence
  Description of Artificial Sequence: Synthetic oligonucleotide
ccaggcccagccaccctgcgttggcctgtaagcgttcca

SEQ ID NO: 1521 - DNA, 23 bp, Artificial Sequence
  Description of Artificial Sequence: Synthetic probe
ttaagtccaccaggcccagccac

SEQ ID NO: 1522 - DNA, 21 bp, Artificial Sequence
  Description of Artificial Sequence: Synthetic primer
tgaacgctcaaacacgtgaac

SEQ ID NO: 1523 - DNA, 20 bp, Artificial Sequence
  Description of Artificial Sequence: Synthetic primer
tggaacgcttacaggccaac

SEQ ID NO: 1524 - DNA, 43 bp, Artificial Sequence
  Description of Artificial Sequence: Synthetic primer
  Description of Combined DNA/RNA Molecule: Synthetic primer
tggaacgcttacaggccaacccctgaggctgagggagtgtatc

SEQ ID NO: 1525 - DNA, 53 bp, Artificial Sequence
  Description of Artificial Sequence: Synthetic primer
  Description of Combined DNA/RNA Molecule: Synthetic primer
acgacgacgacgaatttaattagataagaggatgatcctaaagggacacagta

SEQ ID NO: 1526 - DNA, 51 bp, Artificial Sequence
  Description of Artificial Sequence: Synthetic primer
  Description of Combined DNA/RNA Molecule: Synthetic primer
acgacgacgacttgacgaacataatgcacagtgccattgtgtggccagctc

SEQ ID NO: 1527 - DNA, 47 bp, Artificial Sequence
  Description of Artificial Sequence: Synthetic oligonucleotide
  Description of Combined DNA/RNA Molecule: Synthetic oligonucleotide
tacacgtggatatctccgacccagtggtcccacccatcatcaccttc

SEQ ID NO: 1528 - DNA, 46 bp, Artificial Sequence
  Description of Artificial Sequence: Synthetic oligonucleotide
cctctacagggagggagccacagccggtgctagtcacacagttcca

SEQ ID NO: 1529 - DNA, 29 bp, Artificial Sequence
  Description of Artificial Sequence: Synthetic probe
ttatcatcacctctacagggagggagcca

SEQ ID NO: 1530 - DNA, 21 bp, Artificial Sequence
  Description of Artificial Sequence: Synthetic primer
tacacgtggatatctccgacc

SEQ ID NO: 1531 - DNA, 21 bp, Artificial Sequence
  Description of Artificial Sequence: Synthetic primer
tggaactgtgtgactagcacc

SEQ ID NO: 1532 - DNA, 44 bp, Artificial Sequence
  Description of Artificial Sequence: Synthetic primer
  Description of Combined DNA/RNA Molecule: Synthetic primer
tggaactgtgtgactagcacctgtggccagcttgaggttgtggt

SEQ ID NO: 1533 - DNA, 43 bp, Artificial Sequence
  Description of Artificial Sequence: Synthetic primer
  Description of Combined DNA/RNA Molecule: Synthetic primer
acgacgacgacgaacagccactatcatgtccactcccagggtt

SEQ ID NO: 1534 - DNA, 44 bp, Artificial Sequence
  Description of Artificial Sequence: Synthetic primer
  Description of Combined DNA/RNA Molecule: Synthetic primer
acgacgacgacgaacacaccaccagccactatcatgtccactct

SEQ ID NO: 1535 - DNA, 57 bp, Artificial Sequence
  Description of Artificial Sequence: Synthetic primer
  Description of Combined DNA/RNA Molecule: Synthetic primer
acgacgacgacttgacgaacataatcaccaccctgaagatgaacatcactgcuggaa

SEQ ID NO: 1536 - DNA, 45 bp, Artificial Sequence
  Description of Artificial Sequence: Synthetic oligonucleotide
  Description of Combined DNA/RNA Molecule: Synthetic oligonucleotide
tagcattcgagaacgcacccatccacctccttgagcctcaaccga

SEQ ID NO: 1537 - DNA, 47 bp, Artificial Sequence
  Description of Artificial Sequence: Synthetic oligonucleotide
accagctgaacagcccagtgaccatcggtgctagtcacacagttcca

SEQ ID NO: 1538 - DNA, 25 bp, Artificial Sequence
  Description of Artificial Sequence: Synthetic probe
aaagcctcaaccagctgaacagccc

SEQ ID NO: 1539 - DNA, 19 bp, Artificial Sequence
  Description of Artificial Sequence: Synthetic primer
tagcattcgagaacgcacc

SEQ ID NO: 1540 - DNA, 21 bp, Artificial Sequence
  Description of Artificial Sequence: Synthetic primer
tggaactgtgtgactagcacc

SEQ ID NO: 1541 - DNA, 52 bp, Artificial Sequence
  Description of Artificial Sequence: Synthetic primer
  Description of Combined DNA/RNA Molecule: Synthetic primer
tggaactgtgtgactagcaccccaccctgaagatgaacatcactgttgggac

SEQ ID NO: 1542 - DNA, 43 bp, Artificial Sequence
  Description of Artificial Sequence: Synthetic primer
  Description of Combined DNA/RNA Molecule: Synthetic primer
acgacgacgacgaaggagcttcaggtttgtgtagggcaaggat

SEQ ID NO: 1543 - DNA, 63 bp, Artificial Sequence
  Description of Artificial Sequence: Synthetic primer
  Description of Combined DNA/RNA Molecule: Synthetic primer
acgacgacgacttgacgaacataatgaatgtgagtcttctacatctgacagcagtttaggaga

SEQ ID NO: 1544 - DNA, 47 bp, Artificial Sequence
  Description of Artificial Sequence: Synthetic oligonucleotide
  Description of Combined DNA/RNA Molecule: Synthetic oligonucleotide
taaccgggcctaaagtgacaggacagggcagttctgcattcagccga

SEQ ID NO: 1545 - DNA, 45 bp, Artificial Sequence
  Description of Artificial Sequence: Synthetic oligonucleotide
gccaggttggccctcaaggaccctgttacgtgatctccctctcca

SEQ ID NO: 1546 - DNA, 25 bp, Artificial Sequence
  Description of Artificial Sequence: Synthetic probe
aagcattcagccaggttggccctca

SEQ ID NO: 1547 - DNA, 20 bp, Artificial Sequence
  Description of Artificial Sequence: Synthetic primer
taaccgggcctaaagtgaca

SEQ ID NO: 1548 - DNA, 22 bp, Artificial Sequence
  Description of Artificial Sequence: Synthetic primer
tggagagggagatcacgtaaca

SEQ ID NO: 1549 - DNA, 53 bp, Artificial Sequence
  Description of Artificial Sequence: Synthetic primer
  Description of Combined DNA/RNA Molecule: Synthetic primer
tggagagggagatcacgtaacatgacagcagtttaggaggttgagggtggcta

SEQ ID NO: 1550 - DNA, 44 bp, Artificial Sequence
  Description of Artificial Sequence: Synthetic primer
  Description of Combined DNA/RNA Molecule: Synthetic primer
acgacgacgacgaaccagggtctcaacccaaataaggcagtgta

SEQ ID NO: 1551 - DNA, 40 bp, Artificial Sequence
  Description of Artificial Sequence: Synthetic primer
  Description of Combined DNA/RNA Molecule: Synthetic primer
acgacgacgacgaagccccagggtctcaacccaaauaaga

SEQ ID NO: 1552 - DNA, 48 bp, Artificial Sequence
  Description of Artificial Sequence: Synthetic primer
  Description of Combined DNA/RNA Molecule: Synthetic primer
acgacgacgacttgacgaacataattctgctgcccttgccacccctgc

SEQ ID NO: 1553 - DNA, 46 bp, Artificial Sequence
  Description of Artificial Sequence: Synthetic oligonucleotide
  Description of Combined DNA/RNA Molecule: Synthetic oligonucleotide
tcgatggtcaatgagcttcacagtggaggagagccatgacacagaa

SEQ ID NO: 1554 - DNA, 44 bp, Artificial Sequence
  Description of Artificial Sequence: Synthetic oligonucleotide
caggagcagcatgggtccagggtgttacgtgatctccctctcca

SEQ ID NO: 1555 - DNA, 26 bp, Artificial Sequence
  Description of Artificial Sequence: Synthetic probe
ttcatgacacaggagcagcatgggtc

SEQ ID NO: 1556 - DNA, 22 bp, Artificial Sequence
  Description of Artificial Sequence: Synthetic primer
tcgatggtcaatgagcttcaca

SEQ ID NO: 1557 - DNA, 22 bp, Artificial Sequence
  Description of Artificial Sequence: Synthetic primer
tggagagggagatcacgtaaca

SEQ ID NO: 1558 - DNA, 45 bp, Artificial Sequence
  Description of Artificial Sequence: Synthetic primer
  Description of Combined DNA/RNA Molecule: Synthetic primer
tggagagggagatcacgtaacagccacccctgttgcccttggact

SEQ ID NO: 1559 - DNA, 36 bp, Artificial Sequence
  Description of Artificial Sequence: Synthetic primer
  Description of Combined DNA/RNA Molecule: Synthetic primer
acgacgacgacgaaggtgccacagcagggcactgat

SEQ ID NO: 1560 - DNA, 36 bp, Artificial Sequence
  Description of Artificial Sequence: Synthetic primer
  Description of Combined DNA/RNA Molecule: Synthetic primer
acgacgacgacgaagcagcccaggtgccacagcaga

SEQ ID NO: 1561 - DNA, 58 bp, Artificial Sequence
  Description of Artificial Sequence: Synthetic primer
  Description of Combined DNA/RNA Molecule: Synthetic primer
acgacgacgacttgacgaacataatcctctgcccaaaaaacaaggaattgtgggtgta

SEQ ID NO: 1562 - DNA, 48 bp, Artificial Sequence
  Description of Artificial Sequence: Synthetic oligonucleotide
  Description of Combined DNA/RNA Molecule: Synthetic oligonucleotide
tcgatggtcaatgagcttcacagacaagtcccaccaagcctcaccatt

SEQ ID NO: 1563 - DNA, 47 bp, Artificial Sequence
  Description of Artificial Sequence: Synthetic oligonucleotide
ccacccaggttcaaggccaccttcatgttacgtgatctccctctcca

SEQ ID NO: 1564 - DNA, 25 bp, Artificial Sequence
  Description of Artificial Sequence: Synthetic probe
ttagcctcaccacccaggttcaagg

SEQ ID NO: 1565 - DNA, 22 bp, Artificial Sequence
  Description of Artificial Sequence: Synthetic primer
tcgatggtcaatgagcttcaca

SEQ ID NO: 1566 - DNA, 22 bp, Artificial Sequence
  Description of Artificial Sequence: Synthetic primer
tggagagggagatcacgtaaca

SEQ ID NO: 1567 - DNA, 54 bp, Artificial Sequence
  Description of Artificial Sequence: Synthetic primer
  Description of Combined DNA/RNA Molecule: Synthetic primer
tggagagggagatcacgtaacaaaaacaaggaattgtgggtgtgaagatggccc

SEQ ID NO: 1568 - DNA, 38 bp, Artificial Sequence
  Description of Artificial Sequence: Synthetic primer
  Description of Combined DNA/RNA Molecule: Synthetic primer
acgacgacgacgaatgcaccaccctcaccctcagatct

SEQ ID NO: 1569 - DNA, 39 bp, Artificial Sequence
  Description of Artificial Sequence: Synthetic primer
  Description of Combined DNA/RNA Molecule: Synthetic primer
acgacgacgacgaaggctctgcaccaccctcaccctcaa

SEQ ID NO: 1570 - DNA, 50 bp, Artificial Sequence
  Description of Artificial Sequence: Synthetic primer
  Description of Combined DNA/RNA Molecule: Synthetic primer
acgacgacgacttgacgaacataatagtggagccagttgccctggagaac

SEQ ID NO: 1571 - DNA, 49 bp, Artificial Sequence
  Description of Artificial Sequence: Synthetic oligonucleotide
  Description of Combined DNA/RNA Molecule: Synthetic oligonucleotide
tctcgggaccacaatacgaaccacagccaggcatcaccagaccaggttt

SEQ ID NO: 1572 - DNA, 54 bp, Artificial Sequence
  Description of Artificial Sequence: Synthetic oligonucleotide
ggtccctctcatgccccatgaacacaactattctgttacgctaagctggtgcca

SEQ ID NO: 1573 - DNA, 28 bp, Artificial Sequence
  Description of Artificial Sequence: Synthetic probe
ttcagaccaggtccctctcatgccccat

SEQ ID NO: 1574 - DNA, 21 bp, Artificial Sequence
  Description of Artificial Sequence: Synthetic primer
tctcgggaccacaatacgaac

SEQ ID NO: 1575 - DNA, 20 bp, Artificial Sequence
  Description of Artificial Sequence: Synthetic primer
tggcaccagcttagcgtaac

SEQ ID NO: 1576 - DNA, 50 bp, Artificial Sequence
  Description of Artificial Sequence: Synthetic primer
  Description of Combined DNA/RNA Molecule: Synthetic primer
tggcaccagcttagcgtaacgccagttgccctggagaatagttatgttcg

SEQ ID NO: 1577 - DNA, 41 bp, Artificial Sequence
  Description of Artificial Sequence: Synthetic primer
  Description of Combined DNA/RNA Molecule: Synthetic primer
acgacgacgacgaacatcacagccacagcctggacagtgta

SEQ ID NO: 1578 - DNA, 39 bp, Artificial Sequence
  Description of Artificial Sequence: Synthetic primer
  Description of Combined DNA/RNA Molecule: Synthetic primer
acgacgacgacgaagggtcatcacagccacagccuggat

SEQ ID NO: 1579 - DNA, 51 bp, Artificial Sequence
  Description of Artificial Sequence: Synthetic primer
  Description of Combined DNA/RNA Molecule: Synthetic primer
acgacgacgacttgacgaacataatgtggcctgcagaggagaatgagctta

SEQ ID NO: 1580 - DNA, 45 bp, Artificial Sequence
  Description of Artificial Sequence: Synthetic oligonucleotide
  Description of Combined DNA/RNA Molecule: Synthetic oligonucleotide
ttgctgtgcgcggtagaactggaccccaggttctgcagcaccaag

SEQ ID NO: 1581 - DNA, 42 bp, Artificial Sequence
  Description of Artificial Sequence: Synthetic oligonucleotide
ccagatcagccccagcagcccagttacgctaagctggtgcca

SEQ ID NO: 1582 - DNA, 24 bp, Artificial Sequence
  Description of Artificial Sequence: Synthetic probe
aatgcagcaccagatcagccccag

SEQ ID NO: 1583 - DNA, 19 bp, Artificial Sequence
  Description of Artificial Sequence: Synthetic primer
ttgctgtgcgcggtagaac

SEQ ID NO: 1584 - DNA, 20 bp, Artificial Sequence
  Description of Artificial Sequence: Synthetic primer
tggcaccagcttagcgtaac

SEQ ID NO: 1585 - DNA, 43 bp, Artificial Sequence
  Description of Artificial Sequence: Synthetic primer
  Description of Combined DNA/RNA Molecule: Synthetic primer
tggcaccagcttagcgtaacagggtgtgggtgtgggttgctga

SEQ ID NO: 1586 - DNA, 38 bp, Artificial Sequence
  Description of Artificial Sequence: Synthetic primer
  Description of Combined DNA/RNA Molecule: Synthetic primer
acgacgacgacgaagcaggaacaccccccaccaccaga

SEQ ID NO: 1587 - DNA, 38 bp, Artificial Sequence
  Description of Artificial Sequence: Synthetic primer
  Description of Combined DNA/RNA Molecule: Synthetic primer
acgacgacgacgaaggaacaccccccaccaccaggtgt

SEQ ID NO: 1588 - DNA, 51 bp, Artificial Sequence
  Description of Artificial Sequence: Synthetic primer
  Description of Combined DNA/RNA Molecule: Synthetic primer
acgacgacgacttgacgaacataattgatcctgggtctgaggctgcuctgg

SEQ ID NO: 1589 - DNA, 43 bp, Artificial Sequence
  Description of Artificial Sequence: Synthetic oligonucleotide
  Description of Combined DNA/RNA Molecule: Synthetic oligonucleotide
tctcgattacgctccgcactgctgggtgcaccagcccagtcgt

SEQ ID NO: 1590 - DNA, 51 bp, Artificial Sequence
  Description of Artificial Sequence: Synthetic oligonucleotide
gtcactagcctgccacttccccttcttccgtgtgtagcttagacatggcca

SEQ ID NO: 1591 - DNA, 25 bp, Artificial Sequence
  Description of Artificial Sequence: Synthetic probe
ttcagcccagtcactagcctgccac

SEQ ID NO: 1592 - DNA, 19 bp, Artificial Sequence
  Description of Artificial Sequence: Synthetic primer
tctcgattacgctccgcac

SEQ ID NO: 1593 - DNA, 22 bp, Artificial Sequence
  Description of Artificial Sequence: Synthetic primer
tggccatgtctaagctacacac

SEQ ID NO: 1594 - DNA, 46 bp, Artificial Sequence
  Description of Artificial Sequence: Synthetic primer
  Description of Combined DNA/RNA Molecule: Synthetic primer
tggccatgtctaagctacacactgaggctgctctgaccattgggaa

SEQ ID NO: 1595 - DNA, 36 bp, Artificial Sequence
  Description of Artificial Sequence: Synthetic primer
  Description of Combined DNA/RNA Molecule: Synthetic primer
acgacgacgacgaacagtggcagcagaggcaggcaa

SEQ ID NO: 1596 - DNA, 39 bp, Artificial Sequence
  Description of Artificial Sequence: Synthetic primer
  Description of Combined DNA/RNA Molecule: Synthetic primer
acgacgacgacgaaggacatggtgcagtggcagcaggga

SEQ ID NO: 1597 - DNA, 54 bp, Artificial Sequence
  Description of Artificial Sequence: Synthetic primer
  Description of Combined DNA/RNA Molecule: Synthetic primer
acgacgacgacttgacgaacataatgtaaatgccttggctgtgagctccctcct

SEQ ID NO: 1598 - DNA, 45 bp, Artificial Sequence
  Description of Artificial Sequence: Synthetic oligonucleotide
  Description of Combined DNA/RNA Molecule: Synthetic oligonucleotide
tcacagagacttgccgatcacgcagctggaccccaagtcagcatc

SEQ ID NO: 1599 - DNA, 52 bp, Artificial Sequence
  Description of Artificial Sequence: Synthetic oligonucleotide
gcactgcaccttatatgacagcccacaggcgtgtgtagcttagacatggcca

SEQ ID NO: 1600 - DNA, 33 bp, Artificial Sequence
  Description of Artificial Sequence: Synthetic probe
ttcaagtcagcactgcaccttatatgacagccc

SEQ ID NO: 1601 - DNA, 21 bp, Artificial Sequence
  Description of Artificial Sequence: Synthetic primer
tcacagagacttgccgatcac

SEQ ID NO: 1602 - DNA, 22 bp, Artificial Sequence
  Description of Artificial Sequence: Synthetic primer
tggccatgtctaagctacacac

SEQ ID NO: 1603 - DNA, 44 bp, Artificial Sequence
  Description of Artificial Sequence: Synthetic primer
  Description of Combined DNA/RNA Molecule: Synthetic primer
tggccatgtctaagctacacacgctccctccctgggcttgtgga

SEQ ID NO: 1604 - DNA, 39 bp, Artificial Sequence
  Description of Artificial Sequence: Synthetic primer
  Description of Combined DNA/RNA Molecule: Synthetic primer
acgacgacgacgaaaggttcaggttcccagggcaccttt

SEQ ID NO: 1605 - DNA, 39 bp, Artificial Sequence
  Description of Artificial Sequence: Synthetic primer
  Description of Combined DNA/RNA Molecule: Synthetic primer
acgacgacgacgaagaggcagggtgggaggttcaggttt

SEQ ID NO: 1606 - DNA, 48 bp, Artificial Sequence
  Description of Artificial Sequence: Synthetic primer
  Description of Combined DNA/RNA Molecule: Synthetic primer
acgacgacgacttgacgaacataatccctcaggctgagggtgcatggg

SEQ ID NO: 1607 - DNA, 47 bp, Artificial Sequence
  Description of Artificial Sequence: Synthetic oligonucleotide
  Description of Combined DNA/RNA Molecule: Synthetic oligonucleotide
tcacagagacttgccgatcaccaacccaccccactttcctcaucctc

SEQ ID NO: 1608 - DNA, 46 bp, Artificial Sequence
  Description of Artificial Sequence: Synthetic oligonucleotide
tccctccacacacaccctgcctgtgtgtgtagcttagacatggcca

SEQ ID NO: 1609 - DNA, 28 bp, Artificial Sequence
  Description of Artificial Sequence: Synthetic probe
aattcctcatccctccacacacaccctg

SEQ ID NO: 1610 - DNA, 21 bp, Artificial Sequence
  Description of Artificial Sequence: Synthetic primer
tcacagagacttgccgatcac

SEQ ID NO: 1611 - DNA, 22 bp, Artificial Sequence
  Description of Artificial Sequence: Synthetic primer
tggccatgtctaagctacacac

SEQ ID NO: 1612 - DNA, 46 bp, Artificial Sequence
  Description of Artificial Sequence: Synthetic primer
  Description of Combined DNA/RNA Molecule: Synthetic primer
tggccatgtctaagctacacaccctcaggctgagggtgcgtggaag

SEQ ID NO: 1613 - DNA, 46 bp, Artificial Sequence
  Description of Artificial Sequence: Synthetic primer
  Description of Combined DNA/RNA Molecule: Synthetic primer
acgacgacgacgaagccaccatccagtcatgatcataaccaaggct

SEQ ID NO: 1614 - DNA, 47 bp, Artificial Sequence
  Description of Artificial Sequence: Synthetic primer
  Description of Combined DNA/RNA Molecule: Synthetic primer
acgacgacgacgaaccatccagtcatgatcataaccaaggccutgtt

SEQ ID NO: 1615 - DNA, 54 bp, Artificial Sequence
  Description of Artificial Sequence: Synthetic primer
  Description of Combined DNA/RNA Molecule: Synthetic primer
acgacgacgacttgacgaacataatgaggttgggaagtctgctgaggaagggct

SEQ ID NO: 1616 - DNA, 44 bp, Artificial Sequence
  Description of Artificial Sequence: Synthetic oligonucleotide
  Description of Combined DNA/RNA Molecule: Synthetic oligonucleotide
ttcgtccctgcacgctaacgcccaaacccaccacccccagcaat

SEQ ID NO: 1617 - DNA, 40 bp, Artificial Sequence
  Description of Artificial Sequence: Synthetic oligonucleotide
gcagccaccccacacaggccgttccatcaccgttaggcca

SEQ ID NO: 1618 - DNA, 19 bp, Artificial Sequence
  Description of Artificial Sequence: Synthetic probe
ttacccccagcagccaccc

SEQ ID NO: 1619 - DNA, 19 bp, Artificial Sequence
  Description of Artificial Sequence: Synthetic primer
ttcgtccctgcacgctaac

SEQ ID NO: 1620 - DNA, 20 bp, Artificial Sequence
  Description of Artificial Sequence: Synthetic primer
tggcctaacggtgatggaac

SEQ ID NO: 1621 - DNA, 46 bp, Artificial Sequence
  Description of Artificial Sequence: Synthetic primer
  Description of Combined DNA/RNA Molecule: Synthetic primer
tggcctaacggtgatggaacgtctgctgaggaagggcctatgtgga

SEQ ID NO: 1622 - DNA, 40 bp, Artificial Sequence
  Description of Artificial Sequence: Synthetic primer
  Description of Combined DNA/RNA Molecule: Synthetic primer
acgacgacgacgaaccaccacatccttccccagcaactcg

SEQ ID NO: 1623 - DNA, 62 bp, Artificial Sequence
  Description of Artificial Sequence: Synthetic primer
  Description of Combined DNA/RNA Molecule: Synthetic primer
acgacgacgacttgacgaacataatctccttactaagaccctagtctttgatctggggaaga

SEQ ID NO: 1624 - DNA, 56 bp, Artificial Sequence
  Description of Artificial Sequence: Synthetic oligonucleotide
  Description of Combined DNA/RNA Molecule: Synthetic oligonucleotide
tgatgctggcaaaccctagaaccaaaggcctttacatcccactgaaaagcagttcc

SEQ ID NO: 1625 - DNA, 57 bp, Artificial Sequence
  Description of Artificial Sequence: Synthetic oligonucleotide
gttttctttcatttgtgcccattcattcttgcagcccgttccatcaccgttaggcca

SEQ ID NO: 1626 - DNA, 39 bp, Artificial Sequence
  Description of Artificial Sequence: Synthetic probe
ccaaaagcagttttctttcatttgtgcccattcattctt

SEQ ID NO: 1627 - DNA, 22 bp, Artificial Sequence
  Description of Artificial Sequence: Synthetic primer
tgatgctggcaaaccctagaac

SEQ ID NO: 1628 - DNA, 20 bp, Artificial Sequence
  Description of Artificial Sequence: Synthetic primer
tggcctaacggtgatggaac

SEQ ID NO: 1629 - DNA, 45 bp, Artificial Sequence
  Description of Artificial Sequence: Synthetic primer
  Description of Combined DNA/RNA Molecule: Synthetic primer
acgacgacgacgaacacatcctctagcctcacaggacccacctgt

SEQ ID NO: 1630 - DNA, 41 bp, Artificial Sequence
  Description of Artificial Sequence: Synthetic primer
  Description of Combined DNA/RNA Molecule: Synthetic primer
acgacgacgacgaataccccagccacatcctctagcctcat

SEQ ID NO: 1631 - DNA, 53 bp, Artificial Sequence
  Description of Artificial Sequence: Synthetic primer
  Description of Combined DNA/RNA Molecule: Synthetic primer
acgacgacgacttgacgaacataatggaagaggtcttgaggacaatgggtgaa

SEQ ID NO: 1632 - DNA, 53 bp, Artificial Sequence
  Description of Artificial Sequence: Synthetic oligonucleotide
  Description of Combined DNA/RNA Molecule: Synthetic oligonucleotide
tgatgctggcaaaccctagaaccttctggtttcttccctcatggcccaggcct

SEQ ID NO: 1633 - DNA, 47 bp, Artificial Sequence
  Description of Artificial Sequence: Synthetic oligonucleotide
ggctcacccctggctcatcaaacctcagttccatcaccgttaggcca

SEQ ID NO: 1634 - DNA, 21 bp, Artificial Sequence
  Description of Artificial Sequence: Synthetic probe
tttggcccaggctcacccctg

SEQ ID NO: 1635 - DNA, 22 bp, Artificial Sequence
  Description of Artificial Sequence: Synthetic primer
tgatgctggcaaaccctagaac

SEQ ID NO: 1636 - DNA, 20 bp, Artificial Sequence
  Description of Artificial Sequence: Synthetic primer
tggcctaacggtgatggaac

SEQ ID NO: 1637 - DNA, 51 bp, Artificial Sequence
  Description of Artificial Sequence: Synthetic primer
  Description of Combined DNA/RNA Molecule: Synthetic primer
tggcctaacggtgatggaaccttgaggacaatgggtgaggtttggtgagct

SEQ ID NO: 1638 - DNA, 39 bp, Artificial Sequence
  Description of Artificial Sequence: Synthetic primer
  Description of Combined DNA/RNA Molecule: Synthetic primer
acgacgacgacgaaggagcaggcccatggtgacagccat

SEQ ID NO: 1639 - DNA, 37 bp, Artificial Sequence
  Description of Artificial Sequence: Synthetic primer
  Description of Combined DNA/RNA Molecule: Synthetic primer
acgacgacgacgaaggcactgaggagcaggcccatga

SEQ ID NO: 1640 - DNA, 54 bp, Artificial Sequence
  Description of Artificial Sequence: Synthetic primer
  Description of Combined DNA/RNA Molecule: Synthetic primer
acgacgacgacttgacgaacataatgatggcctgagcactgtcaaatgcugctc

SEQ ID NO: 1641 - DNA, 42 bp, Artificial Sequence
  Description of Artificial Sequence: Synthetic oligonucleotide
  Description of Combined DNA/RNA Molecule: Synthetic oligonucleotide
ttttcggcatccgcttccaacaggtagagggctgacaaacga

SEQ ID NO: 1642 - DNA, 47 bp, Artificial Sequence
  Description of Artificial Sequence: Synthetic oligonucleotide
aacagcagggttgtggttgaggctggtggttaacagaggacaggcca

SEQ ID NO: 1643 - DNA, 29 bp, Artificial Sequence
  Description of Artificial Sequence: Synthetic probe
ttgctgacaaacagcagggttgtggttga

SEQ ID NO: 1644 - DNA, 19 bp, Artificial Sequence
  Description of Artificial Sequence: Synthetic primer
ttttcggcatccgcttcca

SEQ ID NO: 1645 - DNA, 21 bp, Artificial Sequence
  Description of Artificial Sequence: Synthetic primer
tggcctgtcctctgttaacca

SEQ ID NO: 1646 - DNA, 48 bp, Artificial Sequence
  Description of Artificial Sequence: Synthetic primer
  Description of Combined DNA/RNA Molecule: Synthetic primer
tggcctgtcctctgttaaccaggcctgagcactgtcaaatgttucaat

SEQ ID NO: 1647 - DNA, 37 bp, Artificial Sequence
  Description of Artificial Sequence: Synthetic primer
  Description of Combined DNA/RNA Molecule: Synthetic primer
acgacgacgacgaaaggcacaccaggcccacacagcg

SEQ ID NO: 1648 - DNA, 42 bp, Artificial Sequence
  Description of Artificial Sequence: Synthetic primer
  Description of Combined DNA/RNA Molecule: Synthetic primer
acgacgacgacgaagttcattagcaggcacaccaggcccacg

SEQ ID NO: 1649 - DNA, 48 bp, Artificial Sequence
  Description of Artificial Sequence: Synthetic primer
  Description of Combined DNA/RNA Molecule: Synthetic primer
acgacgacgacttgacgaacataatggtgtgctgaggctgggagaacc

SEQ ID NO: 1650 - DNA, 48 bp, Artificial Sequence
  Description of Artificial Sequence: Synthetic oligonucleotide
  Description of Combined DNA/RNA Molecule: Synthetic oligonucleotide
tccgggtatacactgtcccacactgtctgcagccacatcatcacattt

SEQ ID NO: 1651 - DNA, 57 bp, Artificial Sequence
  Description of Artificial Sequence: Synthetic oligonucleotide
catccatcatcattacatcagcacagggaagtccactggttaacagaggacaggcca

SEQ ID NO: 1652 - DNA, 36 bp, Artificial Sequence
  Description of Artificial Sequence: Synthetic probe
ttatcatcacatccatcatcattacatcagcacagg

SEQ ID NO: 1653 - DNA, 20 bp, Artificial Sequence
  Description of Artificial Sequence: Synthetic primer
tccgggtatacactgtccca

SEQ ID NO: 1654 - DNA, 21 bp, Artificial Sequence
  Description of Artificial Sequence: Synthetic primer
tggcctgtcctctgttaacca

SEQ ID NO: 1655 - DNA, 46 bp, Artificial Sequence
  Description of Artificial Sequence: Synthetic primer
  Description of Combined DNA/RNA Molecule: Synthetic primer
tggcctgtcctctgttaaccatgaggctgggagaacttgatgtggg

SEQ ID NO: 1656 - DNA, 42 bp, Artificial Sequence
  Description of Artificial Sequence: Synthetic primer
  Description of Combined DNA/RNA Molecule: Synthetic primer
acgacgacgacgaacaactcctcctccttctcccccaagact

SEQ ID NO: 1657 - DNA, 41 bp, Artificial Sequence
  Description of Artificial Sequence: Synthetic primer
  Description of Combined DNA/RNA Molecule: Synthetic primer
acgacgacgacgaactcctccttctcccccaagacccctgc

SEQ ID NO: 1658 - DNA, 54 bp, Artificial Sequence
  Description of Artificial Sequence: Synthetic primer
  Description of Combined DNA/RNA Molecule: Synthetic primer
acgacgacgacttgacgaacataattggtgaagagttgggagctgcttcuggac

SEQ ID NO: 1659 - DNA, 47 bp, Artificial Sequence
  Description of Artificial Sequence: Synthetic oligonucleotide
  Description of Combined DNA/RNA Molecule: Synthetic oligonucleotide
tgcgactctattcacgtccaactccccacacaccatctctcaccctc

SEQ ID NO: 1660 - DNA, 52 bp, Artificial Sequence
  Description of Artificial Sequence: Synthetic oligonucleotide
cccctcataacaggcccaaagagtaaaccccttgctatttggtgtaccgcca

SEQ ID NO: 1661 - DNA, 30 bp, Artificial Sequence
  Description of Artificial Sequence: Synthetic probe
tttctctcacccctcataacaggcccaaag

SEQ ID NO: 1662 - DNA, 21 bp, Artificial Sequence
  Description of Artificial Sequence: Synthetic primer
tgcgactctattcacgtccaa

SEQ ID NO: 1663 - DNA, 21 bp, Artificial Sequence
  Description of Artificial Sequence: Synthetic primer
tggcggtacaccaaatagcaa

SEQ ID NO: 1664 - DNA, 49 bp, Artificial Sequence
  Description of Artificial Sequence: Synthetic primer
  Description of Combined DNA/RNA Molecule: Synthetic primer
tggcggtacaccaaatagcaaagttgggagctgcttctggatatgttta

SEQ ID NO: 1665 - DNA, 39 bp, Artificial Sequence
  Description of Artificial Sequence: Synthetic primer
  Description of Combined DNA/RNA Molecule: Synthetic primer
acgacgacgacgaacctggcaaaccagaagggcauccga

SEQ ID NO: 1666 - DNA, 43 bp, Artificial Sequence; identical to SEQ ID NO: 732
  Description of Artificial Sequence: Synthetic primer
  Description of Combined DNA/RNA Molecule: Synthetic primer

SEQ ID NO: 1667 - DNA, 53 bp, Artificial Sequence
  Description of Artificial Sequence: Synthetic primer
  Description of Combined DNA/RNA Molecule: Synthetic primer
acgacgacgacttgacgaacataatctgtggtctggaaagctggtggggggct

SEQ ID NO: 1668 - DNA, 46 bp, Artificial Sequence
  Description of Artificial Sequence: Synthetic oligonucleotide
  Description of Combined DNA/RNA Molecule: Synthetic oligonucleotide
ttgtgcagagcgaacaacaaacatgcacagaaaggccctcaggctg

SEQ ID NO: 1669 - DNA, 44 bp, Artificial Sequence
  Description of Artificial Sequence: Synthetic oligonucleotide
ggccacctttcccagggctctccttgctatttggtgtaccgcca

SEQ ID NO: 1670 - DNA, 24 bp, Artificial Sequence
  Description of Artificial Sequence: Synthetic probe
ttgccctcaggccacctttcccag

SEQ ID NO: 1671 - DNA, 20 bp, Artificial Sequence
  Description of Artificial Sequence: Synthetic primer
ttgtgcagagcgaacaacaa

SEQ ID NO: 1672 - DNA, 21 bp, Artificial Sequence
  Description of Artificial Sequence: Synthetic primer
tggcggtacaccaaatagcaa

SEQ ID NO: 1673 - DNA, 44 bp, Artificial Sequence
  Description of Artificial Sequence: Synthetic primer
  Description of Combined DNA/RNA Molecule: Synthetic primer
tggcggtacaccaaatagcaaaaagctggtgggaggcttgggaa

SEQ ID NO: 1674 - DNA, 36 bp, Artificial Sequence
  Description of Artificial Sequence: Synthetic primer
acgacgacgacgaagaaactgaagaccccagggcca

SEQ ID NO: 1675 - DNA, 37 bp, Artificial Sequence
  Description of Artificial Sequence: Synthetic primer
  Description of Combined DNA/RNA Molecule: Synthetic primer
acgacgacgacgaaagaccccagggccacagcucctt

SEQ ID NO: 1676 - DNA, 53 bp, Artificial Sequence
  Description of Artificial Sequence: Synthetic primer
  Description of Combined DNA/RNA Molecule: Synthetic primer
acgacgacgacttgacgaacataatgcaccagcagccctgagtatttcatttt

SEQ ID NO: 1677 - DNA, 50 bp, Artificial Sequence
  Description of Artificial Sequence: Synthetic oligonucleotide
  Description of Combined DNA/RNA Molecule: Synthetic oligonucleotide
tccaaacgattaggagcgtcaacctcctgcacacacaccaagccaggacc

SEQ ID NO: 1678 - DNA, 51 bp, Artificial Sequence
  Description of Artificial Sequence: Synthetic oligonucleotide
ggattctgccccaatcatccaccaggcatcttggacagaggtatacgccca

SEQ ID NO: 1679 - DNA, 29 bp, Artificial Sequence
  Description of Artificial Sequence: Synthetic probe
ttcaagccaggattctgccccaatcatcc

SEQ ID NO: 1680 - DNA, 22 bp, Artificial Sequence
  Description of Artificial Sequence: Synthetic primer
tccaaacgattaggagcgtcaa

SEQ ID NO: 1681 - DNA, 21 bp, Artificial Sequence
  Description of Artificial Sequence: Synthetic primer
tgggcgtatacctctgtccaa

SEQ ID NO: 1682 - DNA, 52 bp, Artificial Sequence
  Description of Artificial Sequence: Synthetic primer
  Description of Combined DNA/RNA Molecule: Synthetic primer
tgggcgtatacctctgtccaaatttcccagattgttcagggatgcttggtga

SEQ ID NO: 1683 - DNA, 39 bp, Artificial Sequence
  Description of Artificial Sequence: Synthetic primer
  Description of Combined DNA/RNA Molecule: Synthetic primer
acgacgacgacgaaacaagccaaggacccctgcagggtg

SEQ ID NO: 1684 - DNA, 40 bp, Artificial Sequence
  Description of Artificial Sequence: Synthetic primer
  Description of Combined DNA/RNA Molecule: Synthetic primer
acgacgacgacgaacaggagcacaagccaaggacccctgt

SEQ ID NO: 1685 - DNA, 49 bp, Artificial Sequence
  Description of Artificial Sequence: Synthetic primer
  Description of Combined DNA/RNA Molecule: Synthetic primer
acgacgacgacttgacgaacataatgggagcagatgctgggcacugtcg

SEQ ID NO: 1686 - DNA, 45 bp, Artificial Sequence
  Description of Artificial Sequence: Synthetic oligonucleotide
  Description of Combined DNA/RNA Molecule: Synthetic oligonucleotide
tccaaacgattaggagcgtcaagcagtccccagctgctcaugttt

SEQ ID NO: 1687 - DNA, 47 bp, Artificial Sequence
  Description of Artificial Sequence: Synthetic oligonucleotide
tgtcccaggtcagtgcactcagcacattggacagaggtatacgccca

SEQ ID NO: 1688 - DNA, 26 bp, Artificial Sequence
  Description of Artificial Sequence: Synthetic probe
ttctgctcatgtcccaggtcagtgca

SEQ ID NO: 1689 - DNA, 22 bp, Artificial Sequence
  Description of Artificial Sequence: Synthetic primer
tccaaacgattaggagcgtcaa

SEQ ID NO: 1690 - DNA, 21 bp, Artificial Sequence
  Description of Artificial Sequence: Synthetic primer
tgggcgtatacctctgtccaa

SEQ ID NO: 1691 - DNA, 47 bp, Artificial Sequence
  Description of Artificial Sequence: Synthetic primer
  Description of Combined DNA/RNA Molecule: Synthetic primer
tgggcgtatacctctgtccaacactgtcaccatgggtgtgttgagta

SEQ ID NO: 1692 - DNA, 37 bp, Artificial Sequence
  Description of Artificial Sequence: Synthetic primer
  Description of Combined DNA/RNA Molecule: Synthetic primer
acgacgacgacgaagccaagggcccagggacactgga

SEQ ID NO: 1693 - DNA, 38 bp, Artificial Sequence
  Description of Artificial Sequence: Synthetic primer
  Description of Combined DNA/RNA Molecule: Synthetic primer
acgacgacgacgaactcagtgaggccaagggcccagga

SEQ ID NO: 1694 - DNA, 50 bp, Artificial Sequence
  Description of Artificial Sequence: Synthetic primer
  Description of Combined DNA/RNA Molecule: Synthetic primer
acgacgacgacttgacgaacataatgctgcccttctccctgggtcuggag

SEQ ID NO: 1695 - DNA, 44 bp, Artificial Sequence
  Description of Artificial Sequence: Synthetic oligonucleotide
  Description of Combined DNA/RNA Molecule: Synthetic oligonucleotide
ttgcagcgggtcacaacaagctgcctgacctgagcaacagccgt

SEQ ID NO: 1696 - DNA, 48 bp, Artificial Sequence
  Description of Artificial Sequence: Synthetic oligonucleotide
gccactgaccattgagggtctctgtggttggacagaggtatacgccca

SEQ ID NO: 1697 - DNA, 27 bp, Artificial Sequence
  Description of Artificial Sequence: Synthetic probe
aaagcaacagccactgaccattgaggg

SEQ ID NO: 1698 - DNA, 19 bp, Artificial Sequence
  Description of Artificial Sequence: Synthetic primer
ttgcagcgggtcacaacaa

SEQ ID NO: 1699 - DNA, 21 bp, Artificial Sequence
  Description of Artificial Sequence: Synthetic primer
tgggcgtatacctctgtccaa

SEQ ID NO: 1700 - DNA, 45 bp, Artificial Sequence
  Description of Artificial Sequence: Synthetic primer
  Description of Combined DNA/RNA Molecule: Synthetic primer
tgggcgtatacctctgtccaaccctgggtctgggtgctatggccg

SEQ ID NO: 1701 - DNA, 39 bp, Artificial Sequence
  Description of Artificial Sequence: Synthetic primer
  Description of Combined DNA/RNA Molecule: Synthetic primer
acgacgacgacgaaccactccaccagccacagcagcctt

SEQ ID NO: 1702 - DNA, 41 bp, Artificial Sequence
  Description of Artificial Sequence: Synthetic primer
  Description of Combined DNA/RNA Molecule: Synthetic primer
acgacgacgacgaaacctcaatgccactccaccagccacaa

SEQ ID NO: 1703 - DNA, 53 bp, Artificial Sequence
  Description of Artificial Sequence: Synthetic primer
  Description of Combined DNA/RNA Molecule: Synthetic primer
acgacgacgacttgacgaacataatggtggtgggaatggtggattccagccta

SEQ ID NO: 1704 - DNA, 47 bp, Artificial Sequence
  Description of Artificial Sequence: Synthetic oligonucleotide
  Description of Combined DNA/RNA Molecule: Synthetic oligonucleotide
tcgtcccggtcagtagtcaactccatttgccagggagcttcaagctg

SEQ ID NO: 1705 - DNA, 50 bp, Artificial Sequence
  Description of Artificial Sequence: Synthetic oligonucleotide
agccacacaaaatctctgcaagctgtgctcttgcccattttctgcaccca

SEQ ID NO: 1706 - DNA, 32 bp, Artificial Sequence
  Description of Artificial Sequence: Synthetic probe
ttagcttcaagccacacaaaatctctgcaagc

SEQ ID NO: 1707 - DNA, 20 bp, Artificial Sequence
  Description of Artificial Sequence: Synthetic primer
tcgtcccggtcagtagtcaa

SEQ ID NO: 1708 - DNA, 20 bp, Artificial Sequence
  Description of Artificial Sequence: Synthetic primer
tgggtgcagaaaatgggcaa

SEQ ID NO: 1709 - DNA, 47 bp, Artificial Sequence
  Description of Artificial Sequence: Synthetic primer
  Description of Combined DNA/RNA Molecule: Synthetic primer
tgggtgcagaaaatgggcaatgggaatggtggattccagcttggctc

SEQ ID NO: 1710 - DNA, 38 bp, Artificial Sequence
  Description of Artificial Sequence: Synthetic primer
  Description of Combined DNA/RNA Molecule: Synthetic primer
acgacgacgacgaagcccccaagagcatggccauggga

SEQ ID NO: 1711 - DNA, 37 bp, Artificial Sequence
  Description of Artificial Sequence: Synthetic primer
  Description of Combined DNA/RNA Molecule: Synthetic primer
acgacgacgacgaaggcccccaagagcatggccatga

SEQ ID NO: 1712 - DNA, 56 bp, Artificial Sequence
  Description of Artificial Sequence: Synthetic primer
  Description of Combined DNA/RNA Molecule: Synthetic primer
acgacgacgacttgacgaacataatgtgtgctgagtgagtgtgtgtgtgaaaacta

SEQ ID NO: 1713 - DNA, 44 bp, Artificial Sequence
  Description of Artificial Sequence: Synthetic oligonucleotide
  Description of Combined DNA/RNA Molecule: Synthetic oligonucleotide
ttcgtgcgtcgtgtagcaactgggtcactggagtggtcactttg

SEQ ID NO: 1714 - DNA, 46 bp, Artificial Sequence
  Description of Artificial Sequence: Synthetic oligonucleotide
cttcagcccagacactcacacccccattgcccattttctgcaccca

SEQ ID NO: 1715 - DNA, 30 bp, Artificial Sequence
  Description of Artificial Sequence: Synthetic probe
ttgtggtcacttcagcccagacactcacac

SEQ ID NO: 1716 - DNA, 19 bp, Artificial Sequence
  Description of Artificial Sequence: Synthetic primer
ttcgtgcgtcgtgtagcaa

SEQ ID NO: 1717 - DNA, 20 bp, Artificial Sequence
  Description of Artificial Sequence: Synthetic primer
tgggtgcagaaaatgggcaa

SEQ ID NO: 1718 - DNA, 48 bp, Artificial Sequence
  Description of Artificial Sequence: Synthetic primer
  Description of Combined DNA/RNA Molecule: Synthetic primer
tgggtgcagaaaatgggcaatgtgtgaaaactgctgcactgttgggag

SEQ ID NO: 1719 - DNA, 40 bp, Artificial Sequence
  Description of Artificial Sequence: Synthetic primer
  Description of Combined DNA/RNA Molecule: Synthetic primer
acgacgacgacgaatggaggatgtcagctgatgcaagcta

SEQ ID NO: 1720 - DNA, 41 bp, Artificial Sequence
  Description of Artificial Sequence: Synthetic primer
  Description of Combined DNA/RNA Molecule: Synthetic primer
acgacgacgacgaacttgctggaggatgtcagctgaugcag

SEQ ID NO: 1721 - DNA, 56 bp, Artificial Sequence
  Description of Artificial Sequence: Synthetic primer
  Description of Combined DNA/RNA Molecule: Synthetic primer
acgacgacgacttgacgaacataattatctttgcctcacttgcacttgtgcutgct

SEQ ID NO: 1722 - DNA, 45 bp, Artificial Sequence
  Description of Artificial Sequence: Synthetic oligonucleotide
  Description of Combined DNA/RNA Molecule: Synthetic oligonucleotide
ttcgtgcgtcgtgtagcaaggagagcacatgtggcagtcacagtg

SEQ ID NO: 1723 - DNA, 56 bp, Artificial Sequence
  Description of Artificial Sequence: Synthetic oligonucleotide
cagcaccagtgtttgtgtgtatgtgagaaagcaaggttgcccattttctgcaccca

SEQ ID NO: 1724 - DNA, 32 bp, Artificial Sequence
  Description of Artificial Sequence: Synthetic probe
aagcagtcacagcaccagtgtttgtgtgtatg

SEQ ID NO: 1725 - DNA, 19 bp, Artificial Sequence
  Description of Artificial Sequence: Synthetic primer
ttcgtgcgtcgtgtagcaa

SEQ ID NO: 1726 - DNA, 20 bp, Artificial Sequence
  Description of Artificial Sequence: Synthetic primer
tgggtgcagaaaatgggcaa

SEQ ID NO: 1727 - DNA, 50 bp, Artificial Sequence
  Description of Artificial Sequence: Synthetic primer
  Description of Combined DNA/RNA Molecule: Synthetic primer
tgggtgcagaaaatgggcaactttgcctcacttgcacttgtgcctgccct

SEQ ID NO: 1728 - DNA, 40 bp, Artificial Sequence
  Description of Artificial Sequence: Synthetic primer
  Description of Combined DNA/RNA Molecule: Synthetic primer
acgacgacgacgaaggcacctggctcagtcagtcactccc

SEQ ID NO: 1729 - DNA, 38 bp, Artificial Sequence
  Description of Artificial Sequence: Synthetic primer
  Description of Combined DNA/RNA Molecule: Synthetic primer
acgacgacgacgaatctgcagagggcacctggcucaac

SEQ ID NO: 1730 - DNA, 65 bp, Artificial Sequence
  Description of Artificial Sequence: Synthetic primer
  Description of Combined DNA/RNA Molecule: Synthetic primer
acgacgacgacttgacgaacataatgatttaaatgtccatacaattaaggcatgtggtgaatgct

SEQ ID NO: 1731 - DNA, 46 bp, Artificial Sequence
  Description of Artificial Sequence: Synthetic oligonucleotide
  Description of Combined DNA/RNA Molecule: Synthetic oligonucleotide
tcggagagaggagccctaaacccttccttggcaggcccccaccagt

SEQ ID NO: 1732 - DNA, 43 bp, Artificial Sequence
  Description of Artificial Sequence: Synthetic oligonucleotide
ccaacccacagtgctcagccagccgtttcctctgtgcggacca

SEQ ID NO: 1733 - DNA, 22 bp, Artificial Sequence
  Description of Artificial Sequence: Synthetic probe
ttgcccccaccaacccacagtg

SEQ ID NO: 1734 - DNA, 21 bp, Artificial Sequence
  Description of Artificial Sequence: Synthetic primer
tcggagagaggagccctaaac

SEQ ID NO: 1735 - DNA, 19 bp, Artificial Sequence
  Description of Artificial Sequence: Synthetic primer
tggtccgcacagaggaaac

SEQ ID NO: 1736 - DNA, 36 bp, Artificial Sequence
  Description of Artificial Sequence: Synthetic primer
  Description of Combined DNA/RNA Molecule: Synthetic primer
acgacgacgacgaaccccctcccctgccacaccaaa

SEQ ID NO: 1737 - DNA, 37 bp, Artificial Sequence
  Description of Artificial Sequence: Synthetic primer
  Description of Combined DNA/RNA Molecule: Synthetic primer
acgacgacgacgaacagtcccagccccctcccctgct

SEQ ID NO: 1738 - DNA, 52 bp, Artificial Sequence
  Description of Artificial Sequence: Synthetic primer
  Description of Combined DNA/RNA Molecule: Synthetic primer
acgacgacgacttgacgaacataatttgctgctgctgtcctgtgaccccaaa

SEQ ID NO: 1739 - DNA, 50 bp, Artificial Sequence
  Description of Artificial Sequence: Synthetic oligonucleotide
  Description of Combined DNA/RNA Molecule: Synthetic oligonucleotide
tggcgtaaggacactctgaaaccaaggtcagcaagtcagggcgcagcatt

SEQ ID NO: 1740 - DNA, 49 bp, Artificial Sequence
  Description of Artificial Sequence: Synthetic oligonucleotide
gcaccagcccaggaaactttacaaacctgcgtttcctctgtgcggacca

SEQ ID NO: 1741 - DNA, 19 bp, Artificial Sequence
  Description of Artificial Sequence: Synthetic probe
ttgggcgcagcaccagccc

SEQ ID NO: 1742 - DNA, 22 bp, Artificial Sequence
  Description of Artificial Sequence: Synthetic primer
tggcgtaaggacactctgaaac

SEQ ID NO: 1743 - DNA, 19 bp, Artificial Sequence
  Description of Artificial Sequence: Synthetic primer
tggtccgcacagaggaaac

SEQ ID NO: 1744 - DNA, 46 bp, Artificial Sequence
  Description of Artificial Sequence: Synthetic primer
  Description of Combined DNA/RNA Molecule: Synthetic primer
tggtccgcacagaggaaactcctgtgaccccaagcaggtctgtaag

SEQ ID NO: 1745 - DNA, 43 bp, Artificial Sequence
  Description of Artificial Sequence: Synthetic primer
  Description of Combined DNA/RNA Molecule: Synthetic primer
acgacgacgacgaattttgttgtctgagcacagccacaggacg

SEQ ID NO: 1746 - DNA, 46 bp, Artificial Sequence
  Description of Artificial Sequence: Synthetic primer
  Description of Combined DNA/RNA Molecule: Synthetic primer
acgacgacgacgaacttccacttttgttgtctgagcacagccacaa

SEQ ID NO: 1747 - DNA, 52 bp, Artificial Sequence
  Description of Artificial Sequence: Synthetic primer
  Description of Combined DNA/RNA Molecule: Synthetic primer
acgacgacgacttgacgaacataatgctgtgcacttgtgttgggagcugccc

SEQ ID NO: 1748 - DNA, 46 bp, Artificial Sequence
  Description of Artificial Sequence: Synthetic oligonucleotide
  Description of Combined DNA/RNA Molecule: Synthetic oligonucleotide
tcacgcacgtagggtctaaacacaagggatgctggcagacagcaaa

SEQ ID NO: 1749 - DNA, 41 bp, Artificial Sequence
  Description of Artificial Sequence: Synthetic oligonucleotide
gcaggagcaagcaccacaggcgttgtccggctgtggttaca

SEQ ID NO: 1750 - DNA, 25 bp, Artificial Sequence
  Description of Artificial Sequence: Synthetic probe
aagcagacagcaggagcaagcacca

SEQ ID NO: 1751 - DNA, 21 bp, Artificial Sequence
  Description of Artificial Sequence: Synthetic primer
tcacgcacgtagggtctaaac

SEQ ID NO: 1752 - DNA, 20 bp, Artificial Sequence
  Description of Artificial Sequence: Synthetic primer
tgtaaccacagccggacaac

SEQ ID NO: 1753 - DNA, 49 bp, Artificial Sequence
  Description of Artificial Sequence: Synthetic primer
  Description of Combined DNA/RNA Molecule: Synthetic primer
tgtaaccacagccggacaaccacttgtgttgggagctgcctcctgccta

SEQ ID NO: 1754 - DNA, 42 bp, Artificial Sequence
  Description of Artificial Sequence: Synthetic primer
  Description of Combined DNA/RNA Molecule: Synthetic primer
acgacgacgacgaacaagcctcagcaaacaagtcccacagcc

SEQ ID NO: 1755 - DNA, 46 bp, Artificial Sequence
  Description of Artificial Sequence: Synthetic primer
  Description of Combined DNA/RNA Molecule: Synthetic primer
acgacgacgacgaacagaacacaagcctcagcaaacaagtcccacg

SEQ ID NO: 1756 - DNA, 52 bp, Artificial Sequence
  Description of Artificial Sequence: Synthetic primer
  Description of Combined DNA/RNA Molecule: Synthetic primer
acgacgacgacttgacgaacataatgtgctggagtcaccacctgagaggcac

SEQ ID NO: 1757 - DNA, 48 bp, Artificial Sequence
  Description of Artificial Sequence: Synthetic oligonucleotide
  Description of Combined DNA/RNA Molecule: Synthetic oligonucleotide
tcttacgcccagggaatgtaacctgctcccactggttcctacagctct

SEQ ID NO: 1758 - DNA, 50 bp, Artificial Sequence
  Description of Artificial Sequence: Synthetic oligonucleotide
gcttctgctcagacaccaacaccagacagcgttgtccggctgtggttaca

SEQ ID NO: 1759 - DNA, 30 bp, Artificial Sequence
  Description of Artificial Sequence: Synthetic probe
aatcctacagcttctgctcagacaccaaca

SEQ ID NO: 1760 - DNA, 22 bp, Artificial Sequence
  Description of Artificial Sequence: Synthetic primer
tcttacgcccagggaatgtaac

SEQ ID NO: 1761 - DNA, 20 bp, Artificial Sequence
  Description of Artificial Sequence: Synthetic primer
tgtaaccacagccggacaac

SEQ ID NO: 1762 - DNA, 48 bp, Artificial Sequence
  Description of Artificial Sequence: Synthetic primer
  Description of Combined DNA/RNA Molecule: Synthetic primer
tgtaaccacagccggacaacgtcaccacctgagaggcattgttgtcta

SEQ ID NO: 1763 - DNA, 44 bp, Artificial Sequence
  Description of Artificial Sequence: Synthetic primer
  Description of Combined DNA/RNA Molecule: Synthetic primer
acgacgacgacgaacacaccaaactccccagtatgagcaaaccc

SEQ ID NO: 1764 - DNA, 40 bp, Artificial Sequence
  Description of Artificial Sequence: Synthetic primer
  Description of Combined DNA/RNA Molecule: Synthetic primer
acgacgacgacgaaccacagcacaccaaactccccagtac

SEQ ID NO: 1765 - DNA, 55 bp, Artificial Sequence
  Description of Artificial Sequence: Synthetic primer
  Description of Combined DNA/RNA Molecule: Synthetic primer
acgacgacgacttgacgaacataatgagaggtccagactccagggattccugacc

SEQ ID NO: 1766 - DNA, 50 bp, Artificial Sequence
  Description of Artificial Sequence: Synthetic oligonucleotide
  Description of Combined DNA/RNA Molecule: Synthetic oligonucleotide
tgagcaaaatcttcgtcgacccactgccctcacacttgtcaaacaaacct

SEQ ID NO: 1767 - DNA, 52 bp, Artificial Sequence
  Description of Artificial Sequence: Synthetic oligonucleotide
aactctcaaggcttgcaggtcatctccaggagggttcgatgccttccgtaca

SEQ ID NO: 1768 - DNA, 29 bp, Artificial Sequence
  Description of Artificial Sequence: Synthetic probe
aatcaaacaaactctcaaggcttgcaggt

SEQ ID NO: 1769 - DNA, 21 bp, Artificial Sequence
  Description of Artificial Sequence: Synthetic primer
tgagcaaaatcttcgtcgacc

SEQ ID NO: 1770 - DNA, 20 bp, Artificial Sequence
  Description of Artificial Sequence: Synthetic primer
tgtacggaaggcatcgaacc

SEQ ID NO: 1771 - DNA, 50 bp, Artificial Sequence
  Description of Artificial Sequence: Synthetic primer
  Description of Combined DNA/RNA Molecule: Synthetic primer
tgtacggaaggcatcgaaccctggacctctctgactcctggaggtgaccc

SEQ ID NO: 1772 - DNA, 37 bp, Artificial Sequence
  Description of Artificial Sequence: Synthetic primer
  Description of Combined DNA/RNA Molecule: Synthetic primer
acgacgacgacgaagtgagtccccaggccccaaggtg

SEQ ID NO: 1773 - DNA, 43 bp, Artificial Sequence
  Description of Artificial Sequence: Synthetic primer
  Description of Combined DNA/RNA Molecule: Synthetic primer
acgacgacgacgaagcccataattgtgagtccccaggccccag

SEQ ID NO: 1774 - DNA, 50 bp, Artificial Sequence
  Description of Artificial Sequence: Synthetic primer
  Description of Combined DNA/RNA Molecule: Synthetic primer
acgacgacgacttgacgaacataatgcttgcctggtgctgtgtccatccc

SEQ ID NO: 1775 - DNA, 48 bp, Artificial Sequence
  Description of Artificial Sequence: Synthetic oligonucleotide
  Description of Combined DNA/RNA Molecule: Synthetic oligonucleotide
tggcacatgagagtagttgaccggcactgagactgtccagtcacaggc

SEQ ID NO: 1776 - DNA, 45 bp, Artificial Sequence
  Description of Artificial Sequence: Synthetic oligonucleotide
cagatgcagggcaggaagggtggagggttcgatgccttccgtaca

SEQ ID NO: 1777 - DNA, 27 bp, Artificial Sequence
  Description of Artificial Sequence: Synthetic probe
aaccagtcacagatgcagggcaggaag

SEQ ID NO: 1778 - DNA, 22 bp, Artificial Sequence
  Description of Artificial Sequence: Synthetic primer
tggcacatgagagtagttgacc

SEQ ID NO: 1779 - DNA, 20 bp, Artificial Sequence
  Description of Artificial Sequence: Synthetic primer
tgtacggaaggcatcgaacc

SEQ ID NO: 1780 - DNA, 49 bp, Artificial Sequence
  Description of Artificial Sequence: Synthetic primer
  Description of Combined DNA/RNA Molecule: Synthetic primer
tgtacggaaggcatcgaaccctggtgctgtgtccatcctgatttgctct

SEQ ID NO: 1781 - DNA, 38 bp, Artificial Sequence
  Description of Artificial Sequence: Synthetic primer
  Description of Combined DNA/RNA Molecule: Synthetic primer
acgacgacgacgaagcttgggccaacagaggcaaggag

SEQ ID NO: 1782 - DNA, 38 bp, Artificial Sequence
  Description of Artificial Sequence: Synthetic primer
  Description of Combined DNA/RNA Molecule: Synthetic primer
acgacgacgacgaaggccaacagaggcaagggagccat

SEQ ID NO: 1783 - DNA, 48 bp, Artificial Sequence
  Description of Artificial Sequence: Synthetic primer
  Description of Combined DNA/RNA Molecule: Synthetic primer
acgacgacgacttgacgaacataatctgtgccaggaggctgcccaacg

SEQ ID NO: 1784 - DNA, 43 bp, Artificial Sequence
  Description of Artificial Sequence: Synthetic oligonucleotide
  Description of Combined DNA/RNA Molecule: Synthetic oligonucleotide
tatagtcacgcaggaccacacacagagggcaggcctcaacctc

SEQ ID NO: 1785 - DNA, 45 bp, Artificial Sequence
  Description of Artificial Sequence: Synthetic oligonucleotide
acccttccccaccacaccttgtggtgtttgcggctgtctatgaca

SEQ ID NO: 1786 - DNA, 24 bp, Artificial Sequence
  Description of Artificial Sequence: Synthetic probe
ttggcctcaacccttccccaccac

SEQ ID NO: 1787 - DNA, 20 bp, Artificial Sequence
  Description of Artificial Sequence: Synthetic primer
tatagtcacgcaggaccaca

SEQ ID NO: 1788 - DNA, 21 bp, Artificial Sequence
  Description of Artificial Sequence: Synthetic primer
tgtcatagacagccgcaaaca

SEQ ID NO: 1789 - DNA, 46 bp, Artificial Sequence
  Description of Artificial Sequence: Synthetic primer
  Description of Combined DNA/RNA Molecule: Synthetic primer
tgtcatagacagccgcaaacacaggaggctgcccaacacttgacct

SEQ ID NO: 1790 - DNA, 42 bp, Artificial Sequence
  Description of Artificial Sequence: Synthetic primer
  Description of Combined DNA/RNA Molecule: Synthetic primer
acgacgacgacgaagccctctaccagtcatccatgcagccaa

SEQ ID NO: 1791 - DNA, 43 bp, Artificial Sequence
  Description of Artificial Sequence: Synthetic primer
  Description of Combined DNA/RNA Molecule: Synthetic primer
acgacgacgacgaacactgctgccctctaccagtcatccatgt

SEQ ID NO: 1792 - DNA, 53 bp, Artificial Sequence
  Description of Artificial Sequence: Synthetic primer
  Description of Combined DNA/RNA Molecule: Synthetic primer
acgacgacgacttgacgaacataatgtttcctctcccagtggtgctgcugggc

SEQ ID NO: 1793 - DNA, 48 bp, Artificial Sequence
  Description of Artificial Sequence: Synthetic oligonucleotide
  Description of Combined DNA/RNA Molecule: Synthetic oligonucleotide
tgccctatcgaaaaggacaacaccagacaccatgtcaggctcacaaaa

SEQ ID NO: 1794 - DNA, 47 bp, Artificial Sequence
  Description of Artificial Sequence: Synthetic oligonucleotide
caaggagggctctgccacagtcccagtgtttgcggctgtctatgaca

SEQ ID NO: 1795 - DNA, 24 bp, Artificial Sequence
  Description of Artificial Sequence: Synthetic probe
aaaggctcacaaggagggctctgc

SEQ ID NO: 1796 - DNA, 22 bp, Artificial Sequence
  Description of Artificial Sequence: Synthetic primer
tgccctatcgaaaaggacaaca

SEQ ID NO: 1797 - DNA, 21 bp, Artificial Sequence
  Description of Artificial Sequence: Synthetic primer
tgtcatagacagccgcaaaca

SEQ ID NO: 1798 - DNA, 47 bp, Artificial Sequence
  Description of Artificial Sequence: Synthetic primer
  Description of Combined DNA/RNA Molecule: Synthetic primer
tgtcatagacagccgcaaacaggtgctgttccctgggactatggcaa

SEQ ID NO: 1799 - DNA, 45 bp, Artificial Sequence
  Description of Artificial Sequence: Synthetic primer
  Description of Combined DNA/RNA Molecule: Synthetic primer
acgacgacgacgaagtaatactacaacagcaagaggcccaggaaa

SEQ ID NO: 1800 - DNA, 48 bp, Artificial Sequence
  Description of Artificial Sequence: Synthetic primer
  Description of Combined DNA/RNA Molecule: Synthetic primer
acgacgacgacgaagtttggcagtaatactacaacagcaaggggcctg

SEQ ID NO: 1801 - DNA, 55 bp, Artificial Sequence
  Description of Artificial Sequence: Synthetic primer
  Description of Combined DNA/RNA Molecule: Synthetic primer
acgacgacgacttgacgaacataatgcctaagctaggacagggctctgaaggtga

SEQ ID NO: 1802 - DNA, 47 bp, Artificial Sequence
  Description of Artificial Sequence: Synthetic oligonucleotide
  Description of Combined DNA/RNA Molecule: Synthetic oligonucleotide
taatctccagacctccgaaccgcccacagaaacacaggaacagccga

SEQ ID NO: 1803 - DNA, 49 bp, Artificial Sequence
  Description of Artificial Sequence: Synthetic oligonucleotide
gccaggagaggcagcactacacacatcggtgtaaggattgaacgggaca

SEQ ID NO: 1804 - DNA, 24 bp, Artificial Sequence
  Description of Artificial Sequence: Synthetic probe
ttggagacagccaggagaggcagc

SEQ ID NO: 1805 - DNA, 21 bp, Artificial Sequence
  Description of Artificial Sequence: Synthetic primer
taatctccagacctccgaacc

SEQ ID NO: 1806 - DNA, 22 bp, Artificial Sequence
  Description of Artificial Sequence: Synthetic primer
tgtcccgttcaatccttacacc

SEQ ID NO: 1807 - DNA, 48 bp, Artificial Sequence
  Description of Artificial Sequence: Synthetic primer
  Description of Combined DNA/RNA Molecule: Synthetic primer
tgtcccgttcaatccttacaccctgaaggtgggagggatgtatgtagc

SEQ ID NO: 1808 - DNA, 40 bp, Artificial Sequence
  Description of Artificial Sequence: Synthetic primer
  Description of Combined DNA/RNA Molecule: Synthetic primer
acgacgacgacgaacacctctgcctgctctctccautctc

SEQ ID NO: 1809 - DNA, 38 bp, Artificial Sequence
  Description of Artificial Sequence: Synthetic primer
  Description of Combined DNA/RNA Molecule: Synthetic primer
acgacgacgacgaaccaaggcacctctgcctgcuctcc

SEQ ID NO: 1810 - DNA, 52 bp, Artificial Sequence
  Description of Artificial Sequence: Synthetic primer
  Description of Combined DNA/RNA Molecule: Synthetic primer
acgacgacgacttgacgaacataatgctcagtctgtgtgcccagtgagtcta

SEQ ID NO: 1811 - DNA, 47 bp, Artificial Sequence
  Description of Artificial Sequence: Synthetic oligonucleotide
  Description of Combined DNA/RNA Molecule: Synthetic oligonucleotide
ttttccgcgtcagagcacaagcagcagcaattcagactctcacttct

SEQ ID NO: 1812 - DNA, 55 bp, Artificial Sequence
  Description of Artificial Sequence: Synthetic oligonucleotide
ctttcaacaaagtctcagctccacagcagcacctgttatcggacctagctcgaca

SEQ ID NO: 1813 - DNA, 35 bp, Artificial Sequence
  Description of Artificial Sequence: Synthetic probe
ttactctcactttcaacaaagtctcagctccacag

SEQ ID NO: 1814 - DNA, 19 bp, Artificial Sequence
  Description of Artificial Sequence: Synthetic primer
ttttccgcgtcagagcaca

SEQ ID NO: 1815 - DNA, 22 bp, Artificial Sequence
  Description of Artificial Sequence: Synthetic primer
tgtcgagctaggtccgataaca

SEQ ID NO: 1816 - DNA, 48 bp, Artificial Sequence
  Description of Artificial Sequence: Synthetic primer
  Description of Combined DNA/RNA Molecule: Synthetic primer
tgtcgagctaggtccgataacatgtgcccagtgagtctgtgttgggta

SEQ ID NO: 1817 - DNA, 43 bp, Artificial Sequence
  Description of Artificial Sequence: Synthetic primer
  Description of Combined DNA/RNA Molecule: Synthetic primer
acgacgacgacgaagaagcaagtccatagcagagcccactgaa

SEQ ID NO: 1818 - DNA, 44 bp, Artificial Sequence
  Description of Artificial Sequence: Synthetic primer
  Description of Combined DNA/RNA Molecule: Synthetic primer
acgacgacgacgaaggaggaagcaagtccatagcagagcccatc

SEQ ID NO: 1819 - DNA, 48 bp, Artificial Sequence
  Description of Artificial Sequence: Synthetic primer
  Description of Combined DNA/RNA Molecule: Synthetic primer
acgacgacgacttgacgaacataattgcccagcctggtgtggggggcg

SEQ ID NO: 1820 - DNA, 45 bp, Artificial Sequence
  Description of Artificial Sequence: Synthetic oligonucleotide
  Description of Combined DNA/RNA Molecule: Synthetic oligonucleotide
ttcgctgcccggttaaacacaggaccctcagcagacaacactttt

SEQ ID NO: 1821 - DNA, 46 bp, Artificial Sequence
  Description of Artificial Sequence: Synthetic oligonucleotide
cttcccacccacctgcccaccatgtgttatcggacctagctcgaca

SEQ ID NO: 1822 - DNA, 26 bp, Artificial Sequence
  Description of Artificial Sequence: Synthetic probe
ttgacaacacttcccacccacctgcc

SEQ ID NO: 1823 - DNA, 19 bp, Artificial Sequence
  Description of Artificial Sequence: Synthetic primer
ttcgctgcccggttaaaca

SEQ ID NO: 1824 - DNA, 22 bp, Artificial Sequence
  Description of Artificial Sequence: Synthetic primer
tgtcgagctaggtccgataaca

SEQ ID NO: 1825 - DNA, 47 bp, Artificial Sequence
  Description of Artificial Sequence: Synthetic primer
  Description of Combined DNA/RNA Molecule: Synthetic primer
tgtcgagctaggtccgataacaggagggctccccaacatgatgggcg

SEQ ID NO: 1826 - DNA, 40 bp, Artificial Sequence
  Description of Artificial Sequence: Synthetic primer
  Description of Combined DNA/RNA Molecule: Synthetic primer
acgacgacgacgaagggcctgggcaacatgtttcautgag

SEQ ID NO: 1827 - DNA, 39 bp, Artificial Sequence
  Description of Artificial Sequence: Synthetic primer
  Description of Combined DNA/RNA Molecule: Synthetic primer
acgacgacgacgaatctgggcctgggcaacatgtutcac

SEQ ID NO: 1828 - DNA, 52 bp, Artificial Sequence
  Description of Artificial Sequence: Synthetic primer
  Description of Combined DNA/RNA Molecule: Synthetic primer
acgacgacgacttgacgaacataatcagactggcaggtatgagaggcaggta

SEQ ID NO: 1829 - DNA, 42 bp, Artificial Sequence
  Description of Artificial Sequence: Synthetic oligonucleotide
  Description of Combined DNA/RNA Molecule: Synthetic oligonucleotide
ttcgctgcccggttaaacaagcaggcaggtggtgtcaggcga

SEQ ID NO: 1830 - DNA, 43 bp, Artificial Sequence
  Description of Artificial Sequence: Synthetic oligonucleotide
ggcagggctgcactgaggctctgttatcggacctagctcgaca

SEQ ID NO: 1831 - DNA, 23 bp, Artificial Sequence
  Description of Artificial Sequence: Synthetic probe
aaggtgtcaggcagggctgcact

SEQ ID NO: 1832 - DNA, 19 bp, Artificial Sequence
  Description of Artificial Sequence: Synthetic primer
ttcgctgcccggttaaaca

SEQ ID NO: 1833 - DNA, 22 bp, Artificial Sequence
  Description of Artificial Sequence: Synthetic primer
tgtcgagctaggtccgataaca

SEQ ID NO: 1834 - DNA, 45 bp, Artificial Sequence
  Description of Artificial Sequence: Synthetic primer
  Description of Combined DNA/RNA Molecule: Synthetic primer
tgtcgagctaggtccgataacaggcaggtgaggaggcattggagt

SEQ ID NO: 1835 - DNA, 43 bp, Artificial Sequence
  Description of Artificial Sequence: Synthetic primer
  Description of Combined DNA/RNA Molecule: Synthetic primer
acgacgacgacgaacacctttgcagtcaggtgaaggcacagaa

SEQ ID NO: 1836 - DNA, 41 bp, Artificial Sequence
  Description of Artificial Sequence: Synthetic primer
  Description of Combined DNA/RNA Molecule: Synthetic primer
acgacgacgacgaaggccacctttgcagtcaggtgaaggcg

SEQ ID NO: 1837 - DNA, 52 bp, Artificial Sequence
  Description of Artificial Sequence: Synthetic primer
  Description of Combined DNA/RNA Molecule: Synthetic primer
acgacgacgacttgacgaacataattgccctgctttctctcttggccucttt

SEQ ID NO: 1838 - DNA, 42 bp, Artificial Sequence
  Description of Artificial Sequence: Synthetic oligonucleotide
  Description of Combined DNA/RNA Molecule: Synthetic oligonucleotide
tgctatgccgcattcaaccaggcagggaggccagacaagcgt

SEQ ID NO: 1839 - DNA, 43 bp, Artificial Sequence
  Description of Artificial Sequence: Synthetic oligonucleotide
agcacaggcaggcagagagcagactggagctagttcggcgaca

SEQ ID NO: 1840 - DNA, 26 bp, Artificial Sequence
  Description of Artificial Sequence: Synthetic probe
ttccagacaagcacaggcaggcagag

SEQ ID NO: 1841 - DNA, 20 bp, Artificial Sequence
  Description of Artificial Sequence: Synthetic primer
tgctatgccgcattcaacca

SEQ ID NO: 1842 - DNA, 19 bp, Artificial Sequence
  Description of Artificial Sequence: Synthetic primer
tgtcgccgaactagctcca

SEQ ID NO: 1843 - DNA, 49 bp, Artificial Sequence
  Description of Artificial Sequence: Synthetic primer
  Description of Combined DNA/RNA Molecule: Synthetic primer
tgtcgccgaactagctccatgctttctctcttggcctcttctatgtggc

SEQ ID NO: 1844 - DNA, 40 bp, Artificial Sequence
  Description of Artificial Sequence: Synthetic primer
  Description of Combined DNA/RNA Molecule: Synthetic primer
acgacgacgacgaacaccaaccccctatcaccccauccat

SEQ ID NO: 1845 - DNA, 42 bp, Artificial Sequence
  Description of Artificial Sequence: Synthetic primer
  Description of Combined DNA/RNA Molecule: Synthetic primer
acgacgacgacgaacagcacaccaaccccctatcaccccatt

SEQ ID NO: 1846 - DNA, 54 bp, Artificial Sequence
  Description of Artificial Sequence: Synthetic primer
  Description of Combined DNA/RNA Molecule: Synthetic primer
acgacgacgacttgacgaacataatctaggtggcatgatgcccttgtgagttgt

SEQ ID NO: 1847 - DNA, 49 bp, Artificial Sequence
  Description of Artificial Sequence: Synthetic oligonucleotide
  Description of Combined DNA/RNA Molecule: Synthetic oligonucleotide
tgtgccttacggaaaacccaccactgctcaggtgcaaggatccaccaag

SEQ ID NO: 1848 - DNA, 43 bp, Artificial Sequence
  Description of Artificial Sequence: Synthetic oligonucleotide
ccagacaccacaggactggaggcatggagctagttcggcgaca

SEQ ID NO: 1849 - DNA, 27 bp, Artificial Sequence
  Description of Artificial Sequence: Synthetic probe
ttggatccaccagacaccacaggactg

SEQ ID NO: 1850 - DNA, 20 bp, Artificial Sequence
  Description of Artificial Sequence: Synthetic primer
tgtgccttacggaaaaccca

SEQ ID NO: 1851 - DNA, 19 bp, Artificial Sequence
  Description of Artificial Sequence: Synthetic primer
tgtcgccgaactagctcca

SEQ ID NO: 1852 - DNA, 47 bp, Artificial Sequence
  Description of Artificial Sequence: Synthetic primer
  Description of Combined DNA/RNA Molecule: Synthetic primer
tgtcgccgaactagctccagtggcatgatgcccttgtgagctgccct

SEQ ID NO: 1853 - DNA, 40 bp, Artificial Sequence
  Description of Artificial Sequence: Synthetic primer
  Description of Combined DNA/RNA Molecule: Synthetic primer
acgacgacgacgaaatcctccctcctcaccccacaccctt

SEQ ID NO: 1854 - DNA, 38 bp, Artificial Sequence
  Description of Artificial Sequence: Synthetic primer
  Description of Combined DNA/RNA Molecule: Synthetic primer
acgacgacgacgaaccctcctcaccccacacccucccc

SEQ ID NO: 1855 - DNA, 51 bp, Artificial Sequence
  Description of Artificial Sequence: Synthetic primer
  Description of Combined DNA/RNA Molecule: Synthetic primer
acgacgacgacttgacgaacataatccacccttctgctggcagtggugaga

SEQ ID NO: 1856 - DNA, 49 bp, Artificial Sequence
  Description of Artificial Sequence: Synthetic oligonucleotide
  Description of Combined DNA/RNA Molecule: Synthetic oligonucleotide
tcctgctctgaaaacctacaccgcagaagtgatccaggctgtcautttt

SEQ ID NO: 1857 - DNA, 47 bp, Artificial Sequence
  Description of Artificial Sequence: Synthetic oligonucleotide
ttttctcacagccacccaccagcccggttacataggcggcttagaca

SEQ ID NO: 1858 - DNA, 29 bp, Artificial Sequence
  Description of Artificial Sequence: Synthetic probe
ttgctgtcattttctcacagccacccacc

SEQ ID NO: 1859 - DNA, 22 bp, Artificial Sequence
  Description of Artificial Sequence: Synthetic primer
tcctgctctgaaaacctacacc

SEQ ID NO: 1860 - DNA, 22 bp, Artificial Sequence
  Description of Artificial Sequence: Synthetic primer
tgtctaagccgcctatgtaacc

SEQ ID NO: 1861 - DNA, 47 bp, Artificial Sequence
  Description of Artificial Sequence: Synthetic primer
  Description of Combined DNA/RNA Molecule: Synthetic primer
tgtctaagccgcctatgtaaccacccttctgctggcagtgatgagga

SEQ ID NO: 1862 - DNA, 42 bp, Artificial Sequence
  Description of Artificial Sequence: Synthetic primer
  Description of Combined DNA/RNA Molecule: Synthetic primer
acgacgacgacgaaccatgggtccatccttcactgcauctga

SEQ ID NO: 1863 - DNA, 43 bp, Artificial Sequence
  Description of Artificial Sequence: Synthetic primer
  Description of Combined DNA/RNA Molecule: Synthetic primer
acgacgacgacgaacctgaccatgggtccatccttcacugcac

SEQ ID NO: 1864 - DNA, 52 bp, Artificial Sequence
  Description of Artificial Sequence: Synthetic primer
  Description of Combined DNA/RNA Molecule: Synthetic primer
acgacgacgacttgacgaacataatccctggaccctggtctggagatgtggg

SEQ ID NO: 1865 - DNA, 45 bp, Artificial Sequence
  Description of Artificial Sequence: Synthetic oligonucleotide
  Description of Combined DNA/RNA Molecule: Synthetic oligonucleotide
tttttacgcacagcaccacccactgcctctgacccactcagcctc

SEQ ID NO: 1866 - DNA, 51 bp, Artificial Sequence
  Description of Artificial Sequence: Synthetic oligonucleotide
gccctgcatttgtctgaagcccctcattcggttacataggcggcttagaca

SEQ ID NO: 1867 - DNA, 29 bp, Artificial Sequence
  Description of Artificial Sequence: Synthetic probe
ttccactcagccctgcatttgtctgaagc

SEQ ID NO: 1868 - DNA, 20 bp, Artificial Sequence
  Description of Artificial Sequence: Synthetic primer
tttttacgcacagcaccacc

SEQ ID NO: 1869 - DNA, 22 bp, Artificial Sequence
  Description of Artificial Sequence: Synthetic primer
tgtctaagccgcctatgtaacc

SEQ ID NO: 1870 - DNA, 51 bp, Artificial Sequence
  Description of Artificial Sequence: Synthetic primer
  Description of Combined DNA/RNA Molecule: Synthetic primer
tgtctaagccgcctatgtaaccgaccctggtctggagatgtggagtgagga

SEQ ID NO: 1871 - DNA, 43 bp, Artificial Sequence
  Description of Artificial Sequence: Synthetic primer
  Description of Combined DNA/RNA Molecule: Synthetic primer
acgacgacgacgaacatcctgtgcttctggtacagccacttcg

SEQ ID NO: 1872 - DNA, 45 bp, Artificial Sequence
  Description of Artificial Sequence: Synthetic primer
  Description of Combined DNA/RNA Molecule: Synthetic primer
acgacgacgacgaacactcatcctgtgcttctggtacagccactc

SEQ ID NO: 1873 - DNA, 58 bp, Artificial Sequence
  Description of Artificial Sequence: Synthetic primer
  Description of Combined DNA/RNA Molecule: Synthetic primer
acgacgacgacttgacgaacataatgaggtgagtgtgtagatgagtgggttgaggcaa

SEQ ID NO: 1874 - DNA, 48 bp, Artificial Sequence
  Description of Artificial Sequence: Synthetic oligonucleotide
  Description of Combined DNA/RNA Molecule: Synthetic oligonucleotide
tggacacttcgcccttcttaacccttcagcccagccacctgcacctat

SEQ ID NO: 1875 - DNA, 44 bp, Artificial Sequence
  Description of Artificial Sequence: Synthetic oligonucleotide
cctgccacctggcctcacactgcgtttgggatctgggcatcaca

SEQ ID NO: 1876 - DNA, 21 bp, Artificial Sequence
  Description of Artificial Sequence: Synthetic probe
ttacctgcacctgccacctgg

SEQ ID NO: 1877 - DNA, 22 bp, Artificial Sequence
  Description of Artificial Sequence: Synthetic primer
tggacacttcgcccttcttaac

SEQ ID NO: 1878 - DNA, 21 bp, Artificial Sequence
  Description of Artificial Sequence: Synthetic primer
tgtgatgcccagatcccaaac

SEQ ID NO: 1879 - DNA, 46 bp, Artificial Sequence
  Description of Artificial Sequence: Synthetic primer
  Description of Combined DNA/RNA Molecule: Synthetic primer
tgtgatgcccagatcccaaactgggttgaggcaggagttaggtaga

SEQ ID NO: 1880 - DNA, 39 bp, Artificial Sequence
  Description of Artificial Sequence: Synthetic primer
  Description of Combined DNA/RNA Molecule: Synthetic primer
acgacgacgacgaagcaggacacaggcaggagcaagagt

SEQ ID NO: 1881 - DNA, 40 bp, Artificial Sequence
  Description of Artificial Sequence: Synthetic primer
  Description of Combined DNA/RNA Molecule: Synthetic primer
acgacgacgacgaagactgcaggacacaggcaggagcaaa

SEQ ID NO: 1882 - DNA, 48 bp, Artificial Sequence
  Description of Artificial Sequence: Synthetic primer
  Description of Combined DNA/RNA Molecule: Synthetic primer
acgacgacgacttgacgaacataatgtgtgcagccctgcagcccctga

SEQ ID NO: 1883 - DNA, 44 bp, Artificial Sequence
  Description of Artificial Sequence: Synthetic oligonucleotide
  Description of Combined DNA/RNA Molecule: Synthetic oligonucleotide
tggaggccggagaaattaaacggctgccaagccagcgcagccgt

SEQ ID NO: 1884 - DNA, 45 bp, Artificial Sequence
  Description of Artificial Sequence: Synthetic oligonucleotide
gccacaccacagcagccacttcccgtttgggatctgggcatcaca

SEQ ID NO: 1885 - DNA, 22 bp, Artificial Sequence
  Description of Artificial Sequence: Synthetic probe
ttcagcgcagccacaccacagc

SEQ ID NO: 1886 - DNA, 21 bp, Artificial Sequence
  Description of Artificial Sequence: Synthetic primer
tggaggccggagaaattaaac

SEQ ID NO: 1887 - DNA, 21 bp, Artificial Sequence
  Description of Artificial Sequence: Synthetic primer
tgtgatgcccagatcccaaac

SEQ ID NO: 1888 - DNA, 51 bp, Artificial Sequence
  Description of Artificial Sequence: Synthetic primer
  Description of Combined DNA/RNA Molecule: Synthetic primer
tgtgatgcccagatcccaaacctggaatgaaggtggcaagggaaatggcta

SEQ ID NO: 1889 - DNA, 45 bp, Artificial Sequence
  Description of Artificial Sequence: Synthetic primer
  Description of Combined DNA/RNA Molecule: Synthetic primer
acgacgacgacgaagcttctgccttttattgcaagcagcaccact

SEQ ID NO: 1890 - DNA, 44 bp, Artificial Sequence
  Description of Artificial Sequence: Synthetic primer
  Description of Combined DNA/RNA Molecule: Synthetic primer
acgacgacgacgaactgccttttattgcaagcagcaccaccagg

SEQ ID NO: 1891 - DNA, 52 bp, Artificial Sequence
  Description of Artificial Sequence: Synthetic primer
  Description of Combined DNA/RNA Molecule: Synthetic primer
acgacgacgacttgacgaacataatccccctgattagcatgtggtgcuggtc

SEQ ID NO: 1892 - DNA, 62 bp, Artificial Sequence
  Description of Artificial Sequence: Synthetic oligonucleotide
  Description of Combined DNA/RNA Molecule: Synthetic oligonucleotide
ttgtctctgcgacccatcaacagattccatttgtaaacttattagtgtgcactcgcagggta

SEQ ID NO: 1893 - DNA, 43 bp, Artificial Sequence
  Description of Artificial Sequence: Synthetic oligonucleotide
gggaggaggctcaggaatccaggcttggtacacgttcggcaca

SEQ ID NO: 1894 - DNA, 23 bp, Artificial Sequence
  Description of Artificial Sequence: Synthetic probe
ttactcgcagggaggaggctcag

SEQ ID NO: 1895 - DNA, 20 bp, Artificial Sequence
  Description of Artificial Sequence: Synthetic primer
ttgtctctgcgacccatcaa

SEQ ID NO: 1896 - DNA, 19 bp, Artificial Sequence
  Description of Artificial Sequence: Synthetic primer
tgtgccgaacgtgtaccaa

SEQ ID NO: 1897 - DNA, 41 bp, Artificial Sequence
  Description of Artificial Sequence: Synthetic primer
  Description of Combined DNA/RNA Molecule: Synthetic primer
tgtgccgaacgtgtaccaagctggttgcctgggcttggatc

SEQ ID NO: 1898 - DNA, 40 bp, Artificial Sequence
  Description of Artificial Sequence: Synthetic primer
  Description of Combined DNA/RNA Molecule: Synthetic primer
acgacgacgacgaaagtgccaagcacagctggacaagcaa

SEQ ID NO: 1899 - DNA, 39 bp, Artificial Sequence
  Description of Artificial Sequence: Synthetic primer
  Description of Combined DNA/RNA Molecule: Synthetic primer
acgacgacgacgaaccagcagtgccaagcacagcuggat

SEQ ID NO: 1900 - DNA, 49 bp, Artificial Sequence
  Description of Artificial Sequence: Synthetic primer
  Description of Combined DNA/RNA Molecule: Synthetic primer
acgacgacgacttgacgaacataatgcttcccctgtgctggctcuggta

SEQ ID NO: 1901 - DNA, 44 bp, Artificial Sequence
  Description of Artificial Sequence: Synthetic oligonucleotide
  Description of Combined DNA/RNA Molecule: Synthetic oligonucleotide
tggataaactaagtccgcccacgcagcagcagctggacaagtag

SEQ ID NO: 1902 - DNA, 45 bp, Artificial Sequence
  Description of Artificial Sequence: Synthetic oligonucleotide
agtgacagccccagctccacacacgtgactgagcgacgtctaaca

SEQ ID NO: 1903 - DNA, 26 bp, Artificial Sequence
  Description of Artificial Sequence: Synthetic probe
ttctggacaagtgacagccccagctc

SEQ ID NO: 1904 - DNA, 22 bp, Artificial Sequence
  Description of Artificial Sequence: Synthetic primer
tggataaactaagtccgcccac

SEQ ID NO: 1905 - DNA, 21 bp, Artificial Sequence
  Description of Artificial Sequence: Synthetic primer
tgttagacgtcgctcagtcac

SEQ ID NO: 1906 - DNA, 46 bp, Artificial Sequence
  Description of Artificial Sequence: Synthetic primer
  Description of Combined DNA/RNA Molecule: Synthetic primer
tgttagacgtcgctcagtcacggctctggtggctgtggtatgtggg

SEQ ID NO: 1907 - DNA, 39 bp, Artificial Sequence
  Description of Artificial Sequence: Synthetic primer
  Description of Combined DNA/RNA Molecule: Synthetic primer
acgacgacgacgaacctaccctgaggcaccctcagggtt

SEQ ID NO: 1908 - DNA, 37 bp, Artificial Sequence
  Description of Artificial Sequence: Synthetic primer
  Description of Combined DNA/RNA Molecule: Synthetic primer
acgacgacgacgaatgaggcaccctcagggtcucacc

SEQ ID NO: 1909 - DNA, 54 bp, Artificial Sequence
  Description of Artificial Sequence: Synthetic primer
  Description of Combined DNA/RNA Molecule: Synthetic primer
acgacgacgacttgacgaacataatcacatcccaagatgcttgtcctgcacttc

SEQ ID NO: 1910 - DNA, 47 bp, Artificial Sequence
  Description of Artificial Sequence: Synthetic oligonucleotide
  Description of Combined DNA/RNA Molecule: Synthetic oligonucleotide
tcctgaattggccacaccacgccacagaggaagaaggcaacaccatt

SEQ ID NO: 1911 - DNA, 50 bp, Artificial Sequence
  Description of Artificial Sequence: Synthetic oligonucleotide
ccaccctcacctgcagaaacctcattcccgtgactgagcgacgtctaaca

SEQ ID NO: 1912 - DNA, 23 bp, Artificial Sequence
  Description of Artificial Sequence: Synthetic probe
ttggcaacaccaccctcacctgc

SEQ ID NO: 1913 - DNA, 20 bp, Artificial Sequence
  Description of Artificial Sequence: Synthetic primer
tcctgaattggccacaccac

SEQ ID NO: 1914 - DNA, 21 bp, Artificial Sequence
  Description of Artificial Sequence: Synthetic primer
tgttagacgtcgctcagtcac

SEQ ID NO: 1915 - DNA, 53 bp, Artificial Sequence
  Description of Artificial Sequence: Synthetic primer
  Description of Combined DNA/RNA Molecule: Synthetic primer
tgttagacgtcgctcagtcaccccaagatgcttgtcctgcactttcctgggag

SEQ ID NO: 1916 - DNA, 37 bp, Artificial Sequence
  Description of Artificial Sequence: Synthetic primer
  Description of Combined DNA/RNA Molecule: Synthetic primer
acgacgacgacgaaacagagaggcaggcagcacacaa

SEQ ID NO: 1917 - DNA, 37 bp, Artificial Sequence
  Description of Artificial Sequence: Synthetic primer
  Description of Combined DNA/RNA Molecule: Synthetic primer
acgacgacgacgaagggcacagagaggcaggcagcat

SEQ ID NO: 1918 - DNA, 55 bp, Artificial Sequence
  Description of Artificial Sequence: Synthetic primer
  Description of Combined DNA/RNA Molecule: Synthetic primer
acgacgacgacttgacgaacataatcttcagcccaggatgtctctgaaccctggg

SEQ ID NO: 1919 - DNA, 49 bp, Artificial Sequence
  Description of Artificial Sequence: Synthetic oligonucleotide
  Description of Combined DNA/RNA Molecule: Synthetic oligonucleotide
ttcttgcggttctggaacacacagagtggtgagactgagccgcaatgag

SEQ ID NO: 1920 - DNA, 47 bp, Artificial Sequence
  Description of Artificial Sequence: Synthetic oligonucleotide
atggaacacactgggaagacccagccgtgatgctccgttgttgctaa

SEQ ID NO: 1921 - DNA, 24 bp, Artificial Sequence
  Description of Artificial Sequence: Synthetic probe
aaagccgcaatggaacacactggg

SEQ ID NO: 1922 - DNA, 20 bp, Artificial Sequence
  Description of Artificial Sequence: Synthetic primer
ttcttgcggttctggaacac

SEQ ID NO: 1923 - DNA, 21 bp, Artificial Sequence
  Description of Artificial Sequence: Synthetic primer
ttagcaacaacggagcatcac

SEQ ID NO: 1924 - DNA, 50 bp, Artificial Sequence
  Description of Artificial Sequence: Synthetic primer
  Description of Combined DNA/RNA Molecule: Synthetic primer
ttagcaacaacggagcatcacaggatgtctctgaaccctggagttgaact

SEQ ID NO: 1925 - DNA, 38 bp, Artificial Sequence
  Description of Artificial Sequence: Synthetic primer
  Description of Combined DNA/RNA Molecule: Synthetic primer
acgacgacgacgaagccagaggctgaagaggcaggccg

SEQ ID NO: 1926 - DNA, 38 bp, Artificial Sequence
  Description of Artificial Sequence: Synthetic primer
  Description of Combined DNA/RNA Molecule: Synthetic primer
acgacgacgacgaaggcagccagaggctgaagaggcaa

SEQ ID NO: 1927 - DNA, 49 bp, Artificial Sequence
  Description of Artificial Sequence: Synthetic primer
  Description of Combined DNA/RNA Molecule: Synthetic primer
acgacgacgacttgacgaacataatggcctgctgggctgaaggaggtag

SEQ ID NO: 1928 - DNA, 44 bp, Artificial Sequence
  Description of Artificial Sequence: Synthetic oligonucleotide
  Description of Combined DNA/RNA Molecule: Synthetic oligonucleotide
tatggtaaaatgtcagcggcaccccagccccaagcctcagggtc

SEQ ID NO: 1929 - DNA, 41 bp, Artificial Sequence
  Description of Artificial Sequence: Synthetic oligonucleotide
gggctggctagggccaggcagtgatgctccgttgttgctaa

SEQ ID NO: 1930 - DNA, 22 bp, Artificial Sequence
  Description of Artificial Sequence: Synthetic probe
ttagcctcagggctggctaggg

SEQ ID NO: 1931 - DNA, 22 bp, Artificial Sequence
  Description of Artificial Sequence: Synthetic primer
tatggtaaaatgtcagcggcac

SEQ ID NO: 1932 - DNA, 21 bp, Artificial Sequence
  Description of Artificial Sequence: Synthetic primer
ttagcaacaacggagcatcac

SEQ ID NO: 1933 - DNA, 49 bp, Artificial Sequence
  Description of Artificial Sequence: Synthetic primer
  Description of Combined DNA/RNA Molecule: Synthetic primer
ttagcaacaacggagcatcacctgaaggaggtaacctggtgcttggcct

SEQ ID NO: 1934 - DNA, 38 bp, Artificial Sequence
  Description of Artificial Sequence: Synthetic primer
  Description of Combined DNA/RNA Molecule: Synthetic primer
acgacgacgacgaaccacaccttcccccagccaugctt

SEQ ID NO: 1935 - DNA, 40 bp, Artificial Sequence
  Description of Artificial Sequence: Synthetic primer
  Description of Combined DNA/RNA Molecule: Synthetic primer
acgacgacgacgaacacagaggcaccacaccttcccccaa

SEQ ID NO: 1936 - DNA, 52 bp, Artificial Sequence
  Description of Artificial Sequence: Synthetic primer
  Description of Combined DNA/RNA Molecule: Synthetic primer
acgacgacgacttgacgaacataatgtgtgtcctgctctccctggtcugcct

SEQ ID NO: 1937 - DNA, 53 bp, Artificial Sequence
  Description of Artificial Sequence: Synthetic oligonucleotide
  Description of Combined DNA/RNA Molecule: Synthetic oligonucleotide
tcctcgagccgatgacacactcagctcccaccacttctttatttcgcauggta

SEQ ID NO: 1938 - DNA, 49 bp, Artificial Sequence
  Description of Artificial Sequence: Synthetic oligonucleotide
tggtggaatcctccacatctcctacagccatgtaacgtccgtgggctaa

SEQ ID NO: 1939 - DNA, 29 bp, Artificial Sequence
  Description of Artificial Sequence: Synthetic probe
cctttcgcatggtggaatcctccacatct

SEQ ID NO: 1940 - DNA, 19 bp, Artificial Sequence
  Description of Artificial Sequence: Synthetic primer
tcctcgagccgatgacaca

SEQ ID NO: 1941 - DNA, 19 bp, Artificial Sequence
  Description of Artificial Sequence: Synthetic primer
ttagcccacggacgttaca

SEQ ID NO: 1942 - DNA, 46 bp, Artificial Sequence
  Description of Artificial Sequence: Synthetic primer
  Description of Combined DNA/RNA Molecule: Synthetic primer
ttagcccacggacgttacactggtctgcccattggtttgatggcta

SEQ ID NO: 1943 - DNA, 48 bp, Artificial Sequence
  Description of Artificial Sequence: Synthetic primer
  Description of Combined DNA/RNA Molecule: Synthetic primer
acgacgacgacgaatggaaacctctctgcactattagactgcauccaa

SEQ ID NO: 1944 - DNA, 49 bp, Artificial Sequence
  Description of Artificial Sequence: Synthetic primer
  Description of Combined DNA/RNA Molecule: Synthetic primer
acgacgacgacgaaccagatggaaacctctctgcactattagacugcac

SEQ ID NO: 1945 - DNA, 53 bp, Artificial Sequence
  Description of Artificial Sequence: Synthetic primer
  Description of Combined DNA/RNA Molecule: Synthetic primer
acgacgacgacttgacgaacataatgggagcttgtgggtgctttctgtugggt

SEQ ID NO: 1946 - DNA, 48 bp, Artificial Sequence
  Description of Artificial Sequence: Synthetic oligonucleotide
  Description of Combined DNA/RNA Molecule: Synthetic oligonucleotide
tactatcgtatcacgccgacagcagatggcacaagcacatacagcatc

SEQ ID NO: 1947 - DNA, 47 bp, Artificial Sequence
  Description of Artificial Sequence: Synthetic oligonucleotide
gcactcagcttaggctctcagaggcagctgtaacgtccgtgggctaa

SEQ ID NO: 1948 - DNA, 31 bp, Artificial Sequence
  Description of Artificial Sequence: Synthetic probe
ttacatacagcactcagcttaggctctcaga

SEQ ID NO: 1949 - DNA, 21 bp, Artificial Sequence
  Description of Artificial Sequence: Synthetic primer
tactatcgtatcacgccgaca

SEQ ID NO: 1950 - DNA, 19 bp, Artificial Sequence
  Description of Artificial Sequence: Synthetic primer
ttagcccacggacgttaca

SEQ ID NO: 1951 - DNA, 47 bp, Artificial Sequence
  Description of Artificial Sequence: Synthetic primer
  Description of Combined DNA/RNA Molecule: Synthetic primer
ttagcccacggacgttacaggagcttgtgggtgctttctgctgggac

SEQ ID NO: 1952 - DNA, 39 bp, Artificial Sequence
  Description of Artificial Sequence: Synthetic primer
  Description of Combined DNA/RNA Molecule: Synthetic primer
acgacgacgacgaattcccctaccctcaccacccctttt

SEQ ID NO: 1953 - DNA, 65 bp, Artificial Sequence
  Description of Artificial Sequence: Synthetic primer
  Description of Combined DNA/RNA Molecule: Synthetic primer
acgacgacgacttgacgaacataatgccccttatatatcaattatgtggacctttttggagacta

SEQ ID NO: 1954 - DNA, 51 bp, Artificial Sequence
  Description of Artificial Sequence: Synthetic oligonucleotide
  Description of Combined DNA/RNA Molecule: Synthetic oligonucleotide
ttgagaccgctgaccgacaagtgtagaggacacccagtaagttgcagaagg

SEQ ID NO: 1955 - DNA, 52 bp, Artificial Sequence
  Description of Artificial Sequence: Synthetic oligonucleotide
gaaaaggcagagacagaggtttcattcccaccctgttgcacggtcgagctaa

SEQ ID NO: 1956 - DNA, 36 bp, Artificial Sequence
  Description of Artificial Sequence: Synthetic probe
ccagttgcagaaaaggcagagacagaggtttcattc

SEQ ID NO: 1957 - DNA, 19 bp, Artificial Sequence
  Description of Artificial Sequence: Synthetic primer
ttgagaccgctgaccgaca

SEQ ID NO: 1958 - DNA, 19 bp, Artificial Sequence
  Description of Artificial Sequence: Synthetic primer
ttagctcgaccgtgcaaca

SEQ ID NO: 1959 - DNA, 51 bp, Artificial Sequence
  Description of Artificial Sequence: Synthetic primer
  Description of Combined DNA/RNA Molecule: Synthetic primer
ttagctcgaccgtgcaacacctttttggagactgaattggagggatgggag

SEQ ID NO: 1960 - DNA, 39 bp, Artificial Sequence
  Description of Artificial Sequence: Synthetic primer
  Description of Combined DNA/RNA Molecule: Synthetic primer
acgacgacgacgaatctgccaccaacagcccacauctgt

SEQ ID NO: 1961 - DNA, 39 bp, Artificial Sequence
  Description of Artificial Sequence: Synthetic primer
  Description of Combined DNA/RNA Molecule: Synthetic primer
acgacgacgacgaagcccccttctgccaccaacagcccg

SEQ ID NO: 1962 - DNA, 51 bp, Artificial Sequence
  Description of Artificial Sequence: Synthetic primer
  Description of Combined DNA/RNA Molecule: Synthetic primer
acgacgacgacttgacgaacataatcttcctgagggtgagtggtgcatgta

SEQ ID NO: 1963 - DNA, 45 bp, Artificial Sequence
  Description of Artificial Sequence: Synthetic oligonucleotide
  Description of Combined DNA/RNA Molecule: Synthetic oligonucleotide
tcgcaacgtgccgaatacacaagccagtctcagccagacactgtt

SEQ ID NO: 1964 - DNA, 48 bp, Artificial Sequence
  Description of Artificial Sequence: Synthetic oligonucleotide
ctgccttcacacacacccaggagtgtcactgttgcacggtcgagctaa

SEQ ID NO: 1965 - DNA, 27 bp, Artificial Sequence
  Description of Artificial Sequence: Synthetic probe
ttccagacactgccttcacacacaccc

SEQ ID NO: 1966 - DNA, 19 bp, Artificial Sequence
  Description of Artificial Sequence: Synthetic primer
tcgcaacgtgccgaataca

SEQ ID NO: 1967 - DNA, 19 bp, Artificial Sequence
  Description of Artificial Sequence: Synthetic primer
ttagctcgaccgtgcaaca

SEQ ID NO: 1968 - DNA, 44 bp, Artificial Sequence
  Description of Artificial Sequence: Synthetic primer
  Description of Combined DNA/RNA Molecule: Synthetic primer
ttagctcgaccgtgcaacacctggaggtgagtggtgcgtgtgat

SEQ ID NO: 1969 - DNA, 46 bp, Artificial Sequence
  Description of Artificial Sequence: Synthetic primer
  Description of Combined DNA/RNA Molecule: Synthetic primer
acgacgacgacgaacagtaaaccagaagcaaatgcaacccagtttt

SEQ ID NO: 1970 - DNA, 46 bp, Artificial Sequence
  Description of Artificial Sequence: Synthetic primer
  Description of Combined DNA/RNA Molecule: Synthetic primer
acgacgacgacgaaccagaagcaaatgcaacccagtttcaccatac

SEQ ID NO: 1971 - DNA, 49 bp, Artificial Sequence
  Description of Artificial Sequence: Synthetic primer
  Description of Combined DNA/RNA Molecule: Synthetic primer
acgacgacgacttgacgaacataattgtgctgaggatgagaggaggtct

SEQ ID NO: 1972 - DNA, 46 bp, Artificial Sequence
  Description of Artificial Sequence: Synthetic oligonucleotide
  Description of Combined DNA/RNA Molecule: Synthetic oligonucleotide
taacgggattgagagtggacacctccacacacccaccttcauctat

SEQ ID NO: 1973 - DNA, 52 bp, Artificial Sequence
  Description of Artificial Sequence: Synthetic oligonucleotide
tctgcacatgctcatacacattcacacccaagatgtctgccgcccttactaa

SEQ ID NO: 1974 - DNA, 34 bp, Artificial Sequence
  Description of Artificial Sequence: Synthetic probe
ttaccttcatctgcacatgctcatacacattcac

SEQ ID NO: 1975 - DNA, 21 bp, Artificial Sequence
  Description of Artificial Sequence: Synthetic primer
taacgggattgagagtggaca

SEQ ID NO: 1976 - DNA, 19 bp, Artificial Sequence
  Description of Artificial Sequence: Synthetic primer
ttagtaagggcggcagaca

SEQ ID NO: 1977 - DNA, 43 bp, Artificial Sequence
  Description of Artificial Sequence: Synthetic primer
  Description of Combined DNA/RNA Molecule: Synthetic primer
ttagtaagggcggcagacagggagggtgctggtgtcctgggta

SEQ ID NO: 1978 - DNA, 43 bp, Artificial Sequence
  Description of Artificial Sequence: Synthetic primer
  Description of Combined DNA/RNA Molecule: Synthetic primer
acgacgacgacgaaccacccactgttgatgtctgcacactccc

SEQ ID NO: 1979 - DNA, 45 bp, Artificial Sequence
  Description of Artificial Sequence: Synthetic primer
  Description of Combined DNA/RNA Molecule: Synthetic primer
acgacgacgacgaaccactgttgatgtctgcacactcctccctcc

SEQ ID NO: 1980 - DNA, 55 bp, Artificial Sequence
  Description of Artificial Sequence: Synthetic primer
  Description of Combined DNA/RNA Molecule: Synthetic primer
acgacgacgacttgacgaacataatcaggctcttcttctgctgggtgtacctcat

SEQ ID NO: 1981 - DNA, 46 bp, Artificial Sequence
  Description of Artificial Sequence: Synthetic oligonucleotide
  Description of Combined DNA/RNA Molecule: Synthetic oligonucleotide
taacgggattgagagtggacagaccctcagaccaccagtcagagtt

SEQ ID NO: 1982 - DNA, 55 bp, Artificial Sequence
  Description of Artificial Sequence: Synthetic oligonucleotide
gagcctggttctctcagaagacaggaagtcagtgagtgtctgccgcccttactaa

SEQ ID NO: 1983 - DNA, 33 bp, Artificial Sequence
  Description of Artificial Sequence: Synthetic probe
ttccagtcagagcctggttctctcagaagacag

SEQ ID NO: 1984 - DNA, 21 bp, Artificial Sequence
  Description of Artificial Sequence: Synthetic primer
taacgggattgagagtggaca

SEQ ID NO: 1985 - DNA, 19 bp, Artificial Sequence
  Description of Artificial Sequence: Synthetic primer
ttagtaagggcggcagaca

SEQ ID NO: 1986 - DNA, 41 bp, Artificial Sequence; identical to SEQ ID NO: 924
  Description of Artificial Sequence: Synthetic primer
  Description of Combined DNA/RNA Molecule: Synthetic primer

SEQ ID NO: 1987 - DNA, 42 bp, Artificial Sequence; identical to SEQ ID NO: 925
  Description of Artificial Sequence: Synthetic primer
  Description of Combined DNA/RNA Molecule: Synthetic primer

SEQ ID NO: 1988 - DNA, 49 bp, Artificial Sequence; identical to SEQ ID NO: 926
  Description of Artificial Sequence: Synthetic primer
  Description of Combined DNA/RNA Molecule: Synthetic primer

SEQ ID NO: 1989 - DNA, 44 bp, Artificial Sequence; identical to SEQ ID NO: 927
  Description of Artificial Sequence: Synthetic oligonucleotide
  Description of Combined DNA/RNA Molecule: Synthetic oligonucleotide

SEQ ID NO: 1990 - DNA, 41 bp, Artificial Sequence; identical to SEQ ID NO: 928
  Description of Artificial Sequence: Synthetic oligonucleotide

SEQ ID NO: 1991 - DNA, 23 bp, Artificial Sequence
  Description of Artificial Sequence: Synthetic probe
ttgagcccacccacacagacccc

SEQ ID NO: 1992 - DNA, 19 bp, Artificial Sequence
  Description of Artificial Sequence: Synthetic primer
tccggatcaaagcagccac

SEQ ID NO: 1993 - DNA, 19 bp, Artificial Sequence
  Description of Artificial Sequence: Synthetic primer
tcaccgtacgccaacacac

SEQ ID NO: 1994 - DNA, 41 bp, Artificial Sequence; identical to SEQ ID NO: 932
  Description of Artificial Sequence: Synthetic primer
  Description of Combined DNA/RNA Molecule: Synthetic primer

SEQ ID NO: 1995 - DNA, 25 bp, Artificial Sequence
  Description of Artificial Sequence: Synthetic primer
  Description of Combined DNA/RNA Molecule: Synthetic primer
acgacgacgacttgacgaacataac

SEQ ID NO: 1996 - DNA, 44 bp, Artificial Sequence; identical to SEQ ID NO: 1031
  Description of Artificial Sequence: Synthetic primer
  Description of Combined DNA/RNA Molecule: Synthetic primer

SEQ ID NO: 1997 - DNA, 43 bp, Artificial Sequence; identical to SEQ ID NO: 1032
  Description of Artificial Sequence: Synthetic primer
  Description of Combined DNA/RNA Molecule: Synthetic primer

SEQ ID NO: 1998 - DNA, 49 bp, Artificial Sequence; identical to SEQ ID NO: 1033
  Description of Artificial Sequence: Synthetic primer
  Description of Combined DNA/RNA Molecule: Synthetic primer

SEQ ID NO: 1999 - DNA, 44 bp, Artificial Sequence; identical to SEQ ID NO: 1034
  Description of Artificial Sequence: Synthetic oligonucleotide
  Description of Combined DNA/RNA Molecule: Synthetic oligonucleotide

SEQ ID NO: 2000 - DNA, 57 bp, Artificial Sequence; identical to SEQ ID NO: 1035
  Description of Artificial Sequence: Synthetic oligonucleotide

SEQ ID NO: 2001 - DNA, 33 bp, Artificial Sequence; identical to SEQ ID NO: 1036
  Description of Artificial Sequence: Synthetic probe

SEQ ID NO: 2002 - DNA, 21 bp, Artificial Sequence
  Description of Artificial Sequence: Synthetic primer
tcactatcggcgtagtcacca

SEQ ID NO: 2003 - DNA, 20 bp, Artificial Sequence
  Description of Artificial Sequence: Synthetic primer
tcctccgggtaaagtcacca

SEQ ID NO: 2004 - DNA, 37 bp, Artificial Sequence; identical to SEQ ID NO: 1772
  Description of Artificial Sequence: Synthetic primer
  Description of Combined DNA/RNA Molecule: Synthetic primer

SEQ ID NO: 2005 - DNA, 43 bp, Artificial Sequence; identical to SEQ ID NO: 1773
  Description of Artificial Sequence: Synthetic primer
  Description of Combined DNA/RNA Molecule: Synthetic primer

SEQ ID NO: 2006 - DNA, 50 bp, Artificial Sequence; identical to SEQ ID NO: 1774
  Description of Artificial Sequence: Synthetic primer
  Description of Combined DNA/RNA Molecule: Synthetic primer

SEQ ID NO: 2007 - DNA, 48 bp, Artificial Sequence; identical to SEQ ID NO: 1775
  Description of Artificial Sequence: Synthetic oligonucleotide
  Description of Combined DNA/RNA Molecule: Synthetic oligonucleotide

SEQ ID NO: 2008 - DNA, 45 bp, Artificial Sequence; identical to SEQ ID NO: 1776
  Description of Artificial Sequence: Synthetic oligonucleotide

SEQ ID NO: 2009 - DNA, 27 bp, Artificial Sequence
  Description of Artificial Sequence: Synthetic probe
aaccagtcacagatgcagggcaggaag

SEQ ID NO: 2010 - DNA, 22 bp, Artificial Sequence
  Description of Artificial Sequence: Synthetic primer
tggcacatgagagtagttgacc

SEQ ID NO: 2011 - DNA, 20 bp, Artificial Sequence
  Description of Artificial Sequence: Synthetic primer
tgtacggaaggcatcgaacc

SEQ ID NO: 2012 - DNA, 49 bp, Artificial Sequence; identical to SEQ ID NO: 1780
  Description of Artificial Sequence: Synthetic primer
  Description of Combined DNA/RNA Molecule: Synthetic primer

SEQ ID NO: 2013 - DNA, 39 bp, Artificial Sequence
  Description of Artificial Sequence: Synthetic primer
  Description of Combined DNA/RNA Molecule: Synthetic primer
acgacgacgacgaactcccctgctccacaccacacccat

SEQ ID NO: 2014 - DNA, 40 bp, Artificial Sequence
  Description of Artificial Sequence: Synthetic primer
  Description of Combined DNA/RNA Molecule: Synthetic primer
acgacgacgacgaacactcagggctccacagctcccctgt

SEQ ID NO: 2015 - DNA, 50 bp, Artificial Sequence
  Description of Artificial Sequence: Synthetic primer
  Description of Combined DNA/RNA Molecule: Synthetic primer
acgacgacgacttgacgaacataatgggtggtggctgaggctacagagcc

SEQ ID NO: 2016 - DNA, 45 bp, Artificial Sequence
  Description of Artificial Sequence: Synthetic oligonucleotide
  Description of Combined DNA/RNA Molecule: Synthetic oligonucleotide
tcccttagagagaacgcccaacccacccccaggactcgcagtatg

SEQ ID NO: 2017 - DNA, 54 bp, Artificial Sequence
  Description of Artificial Sequence: Synthetic oligonucleotide
gtacactcccacaccactatcttgccatcccctggtgacgtacgagtgttctta

SEQ ID NO: 2018 - DNA, 30 bp, Artificial Sequence
  Description of Artificial Sequence: Synthetic probe
ttactcgcagtacactcccacaccactatc

SEQ ID NO: 2019 - DNA, 20 bp, Artificial Sequence
  Description of Artificial Sequence: Synthetic primer
tcccttagagagaacgccca

SEQ ID NO: 2020 - DNA, 22 bp, Artificial Sequence
  Description of Artificial Sequence: Synthetic primer
taagaacactcgtacgtcacca

SEQ ID NO: 2021 - DNA, 48 bp, Artificial Sequence
  Description of Artificial Sequence: Synthetic primer
  Description of Combined DNA/RNA Molecule: Synthetic primer
taagaacactcgtacgtcaccaggctgaggctacagagctgatggcaa

SEQ ID NO: 2022 - DNA, 42 bp, Artificial Sequence
  Description of Artificial Sequence: Synthetic primer
  Description of Combined DNA/RNA Molecule: Synthetic primer
acgacgacgacgaaaatgacagcccagaaactgggcauttct

SEQ ID NO: 2023 - DNA, 43 bp, Artificial Sequence
  Description of Artificial Sequence: Synthetic primer
  Description of Combined DNA/RNA Molecule: Synthetic primer
acgacgacgacgaagacagcccagaaactgggcatttcctgcc

SEQ ID NO: 2024 - DNA, 59 bp, Artificial Sequence
  Description of Artificial Sequence: Synthetic primer
  Description of Combined DNA/RNA Molecule: Synthetic primer
acgacgacgacttgacgaacataattgacctgatctctagaactcagccttcacaaccg

SEQ ID NO: 2025 - DNA, 49 bp, Artificial Sequence
  Description of Artificial Sequence: Synthetic oligonucleotide
  Description of Combined DNA/RNA Molecule: Synthetic oligonucleotide
tctcataccagacgcggtaaccagaggcaagacttctggcaccaccact

SEQ ID NO: 2026 - DNA, 57 bp, Artificial Sequence
  Description of Artificial Sequence: Synthetic oligonucleotide
ccatcatgacatatttttcctatgcccagtccatgcatgttcgtgtcgctgtgctta

SEQ ID NO: 2027 - DNA, 35 bp, Artificial Sequence
  Description of Artificial Sequence: Synthetic probe
aaggcaccaccatcatgacatatttttcctatgcc

SEQ ID NO: 2028 - DNA, 21 bp, Artificial Sequence
  Description of Artificial Sequence: Synthetic primer
tctcataccagacgcggtaac

SEQ ID NO: 2029 - DNA, 19 bp, Artificial Sequence
  Description of Artificial Sequence: Synthetic primer
taagcacagcgacacgaac

SEQ ID NO: 2030 - DNA, 49 bp, Artificial Sequence
  Description of Artificial Sequence: Synthetic primer
  Description of Combined DNA/RNA Molecule: Synthetic primer
taagcacagcgacacgaacccttcacaaccagaatgcatggattgggcg

SEQ ID NO: 2031 - DNA, 41 bp, Artificial Sequence
  Description of Artificial Sequence: Synthetic primer
  Description of Combined DNA/RNA Molecule: Synthetic primer
acgacgacgacgaacccccccacaacttcaggatcagctga

SEQ ID NO: 2032 - DNA, 40 bp, Artificial Sequence
  Description of Artificial Sequence: Synthetic primer
  Description of Combined DNA/RNA Molecule: Synthetic primer
acgacgacgacgaagacccccccacaacttcaggaucagt

SEQ ID NO: 2033 - DNA, 52 bp, Artificial Sequence
  Description of Artificial Sequence: Synthetic primer
  Description of Combined DNA/RNA Molecule: Synthetic primer
acgacgacgacttgacgaacataatgagactgggctgtgggtactgguggta

SEQ ID NO: 2034 - DNA, 47 bp, Artificial Sequence
  Description of Artificial Sequence: Synthetic oligonucleotide
  Description of Combined DNA/RNA Molecule: Synthetic oligonucleotide
ttttcggcggcagctaaacctgatgctcagaggttcatgtcaggaga

SEQ ID NO: 2035 - DNA, 52 bp, Artificial Sequence
  Description of Artificial Sequence: Synthetic oligonucleotide
ggaagttcaggtcctcagacaacctctctccaggttcgtgtcgctgtgctta

SEQ ID NO: 2036 - DNA, 33 bp, Artificial Sequence
  Description of Artificial Sequence: Synthetic probe
aacatgtcaggaagttcaggtcctcagacaacc

SEQ ID NO: 2037 - DNA, 19 bp, Artificial Sequence
  Description of Artificial Sequence: Synthetic primer
ttttcggcggcagctaaac

SEQ ID NO: 2038 - DNA, 19 bp, Artificial Sequence
  Description of Artificial Sequence: Synthetic primer
taagcacagcgacacgaac

SEQ ID NO: 2039 - DNA, 44 bp, Artificial Sequence
  Description of Artificial Sequence: Synthetic primer
  Description of Combined DNA/RNA Molecule: Synthetic primer
taagcacagcgacacgaacgggctgtgggtactggtgatggagt

SEQ ID NO: 2040 - DNA, 45 bp, Artificial Sequence
  Description of Artificial Sequence: Synthetic primer
  Description of Combined DNA/RNA Molecule: Synthetic primer
acgacgacgacgaacagggataccagaagggacactctcaugcag

SEQ ID NO: 2041 - DNA, 52 bp, Artificial Sequence
  Description of Artificial Sequence: Synthetic primer
  Description of Combined DNA/RNA Molecule: Synthetic primer
acgacgacgacttgacgaacataatgatcctgtgggtggtgtggagcactta

SEQ ID NO: 2042 - DNA, 47 bp, Artificial Sequence
  Description of Artificial Sequence: Synthetic oligonucleotide
  Description of Combined DNA/RNA Molecule: Synthetic oligonucleotide
tccggaccttcatcctccatgcaattccagctagggaaaacaaggag

SEQ ID NO: 2043 - DNA, 42 bp, Artificial Sequence
  Description of Artificial Sequence: Synthetic oligonucleotide
agggaaggtggcagctccaggctgggcaggaacacgatagta

SEQ ID NO: 2044 - DNA, 28 bp, Artificial Sequence
  Description of Artificial Sequence: Synthetic probe
ttgaaaacaagggaaggtggcagctcca

SEQ ID NO: 2045 - DNA, 19 bp, Artificial Sequence
  Description of Artificial Sequence: Synthetic primer
tccggaccttcatcctcca

SEQ ID NO: 2046 - DNA, 20 bp, Artificial Sequence
  Description of Artificial Sequence: Synthetic primer
tactatcgtgttcctgccca

SEQ ID NO: 2047 - DNA, 46 bp, Artificial Sequence
  Description of Artificial Sequence: Synthetic primer
  Description of Combined DNA/RNA Molecule: Synthetic primer
tactatcgtgttcctgcccaggtggtgtggagcacttgcctgctct

SEQ ID NO: 2048 - DNA, 39 bp, Artificial Sequence
  Description of Artificial Sequence: Synthetic primer
  Description of Combined DNA/RNA Molecule: Synthetic primer
acgacgacgacgaagcctgggtttgaggagcacaggtat

SEQ ID NO: 2049 - DNA, 41 bp, Artificial Sequence
  Description of Artificial Sequence: Synthetic primer
  Description of Combined DNA/RNA Molecule: Synthetic primer
acgacgacgacgaagggtttgaggagcacaggtacagtggt

SEQ ID NO: 2050 - DNA, 53 bp, Artificial Sequence
  Description of Artificial Sequence: Synthetic primer
  Description of Combined DNA/RNA Molecule: Synthetic primer
acgacgacgacttgacgaacataatgattccaggtttgtgacccctgcugtcc

SEQ ID NO: 2051 - DNA, 46 bp, Artificial Sequence
  Description of Artificial Sequence: Synthetic oligonucleotide
  Description of Combined DNA/RNA Molecule: Synthetic oligonucleotide
ttagccgccaaacgtaccaggctggatcctagagggtcgcagaggt

SEQ ID NO: 2052 - DNA, 52 bp, Artificial Sequence
  Description of Artificial Sequence: Synthetic oligonucleotide
gagaccactgctagagtcccagaggcacaaagtgggcaggaacacgatagta

SEQ ID NO: 2053 - DNA, 28 bp, Artificial Sequence
  Description of Artificial Sequence: Synthetic probe
ttggtcgcagagaccactgctagagtcc

SEQ ID NO: 2054 - DNA, 19 bp, Artificial Sequence
  Description of Artificial Sequence: Synthetic primer
ttagccgccaaacgtacca

SEQ ID NO: 2055 - DNA, 20 bp, Artificial Sequence
  Description of Artificial Sequence: Synthetic primer
tactatcgtgttcctgccca

SEQ ID NO: 2056 - DNA, 47 bp, Artificial Sequence
  Description of Artificial Sequence: Synthetic primer
  Description of Combined DNA/RNA Molecule: Synthetic primer
tactatcgtgttcctgcccacccctgctgtctttgtgcctttgggat

SEQ ID NO: 2057 - DNA, 40 bp, Artificial Sequence
  Description of Artificial Sequence: Synthetic primer
  Description of Combined DNA/RNA Molecule: Synthetic primer
acgacgacgacgaacagcccagctagcatggagcaaaagg

SEQ ID NO: 2058 - DNA, 38 bp, Artificial Sequence
  Description of Artificial Sequence: Synthetic primer
  Description of Combined DNA/RNA Molecule: Synthetic primer
acgacgacgacgaatgcaccagcccagctagcauggaa

SEQ ID NO: 2059 - DNA, 51 bp, Artificial Sequence
  Description of Artificial Sequence: Synthetic primer
  Description of Combined DNA/RNA Molecule: Synthetic primer
acgacgacgacttgacgaacataatgtggagctgattgcccagtgcutagg

SEQ ID NO: 2060 - DNA, 52 bp, Artificial Sequence
  Description of Artificial Sequence: Synthetic oligonucleotide
  Description of Combined DNA/RNA Molecule: Synthetic oligonucleotide
tagcagctgaacaacccaacaagagctcagctgccatctcatagccacccgt

SEQ ID NO: 2061 - DNA, 47 bp, Artificial Sequence
  Description of Artificial Sequence: Synthetic oligonucleotide
cccacacagaaggcctcatcaccctccgttgtatggtcggcatgcta

SEQ ID NO: 2062 - DNA, 28 bp, Artificial Sequence
  Description of Artificial Sequence: Synthetic probe
aaatagccacccacacagaaggcctcat

SEQ ID NO: 2063 - DNA, 20 bp, Artificial Sequence
  Description of Artificial Sequence: Synthetic primer
tagcagctgaacaacccaac

SEQ ID NO: 2064 - DNA, 20 bp, Artificial Sequence
  Description of Artificial Sequence: Synthetic primer
tagcatgccgaccatacaac

SEQ ID NO: 2065 - DNA, 46 bp, Artificial Sequence
  Description of Artificial Sequence: Synthetic primer
  Description of Combined DNA/RNA Molecule: Synthetic primer
tagcatgccgaccatacaacgcccagtgcttagaggaggatgatgg

SEQ ID NO: 2066 - DNA, 44 bp, Artificial Sequence
  Description of Artificial Sequence: Synthetic primer
  Description of Combined DNA/RNA Molecule: Synthetic primer
acgacgacgacgaattcacaggaagccagatcctctccautcct

SEQ ID NO: 2067 - DNA, 44 bp, Artificial Sequence
  Description of Artificial Sequence: Synthetic primer
  Description of Combined DNA/RNA Molecule: Synthetic primer
acgacgacgacgaacaggaagccagatcctctccattcccttga

SEQ ID NO: 2068 - DNA, 48 bp, Artificial Sequence
  Description of Artificial Sequence: Synthetic primer
  Description of Combined DNA/RNA Molecule: Synthetic primer
acgacgacgacttgacgaacataatggtggaggctgctgcttcagtcc

SEQ ID NO: 2069 - DNA, 51 bp, Artificial Sequence
  Description of Artificial Sequence: Synthetic oligonucleotide
  Description of Combined DNA/RNA Molecule: Synthetic oligonucleotide
tctgcccttcgcttcgaacgcaggacagttctgcagaaagttttcaccctt

SEQ ID NO: 2070 - DNA, 41 bp, Artificial Sequence
  Description of Artificial Sequence: Synthetic oligonucleotide
cccccaatcccccagccctgcgttgtatggtcggcatgcta

SEQ ID NO: 2071 - DNA, 25 bp, Artificial Sequence
  Description of Artificial Sequence: Synthetic probe
ttgttttcacccccaatcccccagc

SEQ ID NO: 2072 - DNA, 19 bp, Artificial Sequence
  Description of Artificial Sequence: Synthetic primer
tctgcccttcgcttcgaac

SEQ ID NO: 2073 - DNA, 20 bp, Artificial Sequence
  Description of Artificial Sequence: Synthetic primer
tagcatgccgaccatacaac

SEQ ID NO: 2074 - DNA, 46 bp, Artificial Sequence
  Description of Artificial Sequence: Synthetic primer
  Description of Combined DNA/RNA Molecule: Synthetic primer
tagcatgccgaccatacaacggctgctgcttcagtctggatgcaga

SEQ ID NO: 2075 - DNA, 39 bp, Artificial Sequence
  Description of Artificial Sequence: Synthetic primer
  Description of Combined DNA/RNA Molecule: Synthetic primer
acgacgacgacgaagcccagagaggtgtggagcagcacg

SEQ ID NO: 2076 - DNA, 37 bp, Artificial Sequence
  Description of Artificial Sequence: Synthetic primer
  Description of Combined DNA/RNA Molecule: Synthetic primer
acgacgacgacgaagcaggagaggcccagagaggtgc

SEQ ID NO: 2077 - DNA, 53 bp, Artificial Sequence
  Description of Artificial Sequence: Synthetic primer
  Description of Combined DNA/RNA Molecule: Synthetic primer
acgacgacgacttgacgaacataatggaggaaaggctgagaggtgtgcuccta

SEQ ID NO: 2078 - DNA, 43 bp, Artificial Sequence
  Description of Artificial Sequence: Synthetic oligonucleotide
  Description of Combined DNA/RNA Molecule: Synthetic oligonucleotide
ttgcaaaccacccggacaagcaggaggctccatggacagccgt

SEQ ID NO: 2079 - DNA, 44 bp, Artificial Sequence
  Description of Artificial Sequence: Synthetic oligonucleotide
gccacaggagacagcaccagcaggttggtcagcatcgactccta

SEQ ID NO: 2080 - DNA, 26 bp, Artificial Sequence
  Description of Artificial Sequence: Synthetic probe
ttatggacagccacaggagacagcac

SEQ ID NO: 2081 - DNA, 19 bp, Artificial Sequence
  Description of Artificial Sequence: Synthetic primer
ttgcaaaccacccggacaa

SEQ ID NO: 2082 - DNA, 20 bp, Artificial Sequence
  Description of Artificial Sequence: Synthetic primer
taggagtcgatgctgaccaa

SEQ ID NO: 2083 - DNA, 46 bp, Artificial Sequence
  Description of Artificial Sequence: Synthetic primer
  Description of Combined DNA/RNA Molecule: Synthetic primer
taggagtcgatgctgaccaagctgagaggtgtgctcctgttggtgt

SEQ ID NO: 2084 - DNA, 41 bp, Artificial Sequence
  Description of Artificial Sequence: Synthetic primer
  Description of Combined DNA/RNA Molecule: Synthetic primer
acgacgacgacgaagagccccattgaggtcaagccaugcct

SEQ ID NO: 2085 - DNA, 41 bp, Artificial Sequence
  Description of Artificial Sequence: Synthetic primer
  Description of Combined DNA/RNA Molecule: Synthetic primer
acgacgacgacgaacccattgaggtcaagccatgcccaccc

SEQ ID NO: 2086 - DNA, 48 bp, Artificial Sequence
  Description of Artificial Sequence: Synthetic primer
  Description of Combined DNA/RNA Molecule: Synthetic primer
acgacgacgacttgacgaacataatctgcagctgccacctggcugtga

SEQ ID NO: 2087 - DNA, 47 bp, Artificial Sequence
  Description of Artificial Sequence: Synthetic oligonucleotide
  Description of Combined DNA/RNA Molecule: Synthetic oligonucleotide
ttgcaaaccacccggacaactcccataacccactggaagtcacacga

SEQ ID NO: 2088 - DNA, 43 bp, Artificial Sequence
  Description of Artificial Sequence: Synthetic oligonucleotide
cacaggagcccaaggcacttgggttggtcagcatcgactccta

SEQ ID NO: 2089 - DNA, 25 bp, Artificial Sequence
  Description of Artificial Sequence: Synthetic probe
aagaagtcacacaggagcccaaggc

SEQ ID NO: 2090 - DNA, 19 bp, Artificial Sequence
  Description of Artificial Sequence: Synthetic primer
ttgcaaaccacccggacaa

SEQ ID NO: 2091 - DNA, 20 bp, Artificial Sequence
  Description of Artificial Sequence: Synthetic primer
taggagtcgatgctgaccaa

SEQ ID NO: 2092 - DNA, 43 bp, Artificial Sequence
  Description of Artificial Sequence: Synthetic primer
  Description of Combined DNA/RNA Molecule: Synthetic primer
taggagtcgatgctgaccaactgccacctggctgtgatgacct

SEQ ID NO: 2093 - DNA, 38 bp, Artificial Sequence
  Description of Artificial Sequence: Synthetic primer
  Description of Combined DNA/RNA Molecule: Synthetic primer
acgacgacgacgaagggatcaagcaggcagccaggtcc

SEQ ID NO: 2094 - DNA, 40 bp, Artificial Sequence
  Description of Artificial Sequence: Synthetic primer
  Description of Combined DNA/RNA Molecule: Synthetic primer
acgacgacgacgaagatcaagcaggcagccaggtcctggc

SEQ ID NO: 2095 - DNA, 51 bp, Artificial Sequence
  Description of Artificial Sequence: Synthetic primer
  Description of Combined DNA/RNA Molecule: Synthetic primer
acgacgacgacttgacgaacataattaggtgcctctgctctgaggtuggaa

SEQ ID NO: 2096 - DNA, 46 bp, Artificial Sequence
  Description of Artificial Sequence: Synthetic oligonucleotide
  Description of Combined DNA/RNA Molecule: Synthetic oligonucleotide
taagacgtatgctagcgccaatggaggctgcagctgctccagcttg

SEQ ID NO: 2097 - DNA, 43 bp, Artificial Sequence
  Description of Artificial Sequence: Synthetic oligonucleotide
gctcacagaggcagggagaagggttggtcagcatcgactccta

SEQ ID NO: 2098 - DNA, 22 bp, Artificial Sequence
  Description of Artificial Sequence: Synthetic probe
tttgctccagctcacagaggca

SEQ ID NO: 2099 - DNA, 21 bp, Artificial Sequence
  Description of Artificial Sequence: Synthetic primer
taagacgtatgctagcgccaa

SEQ ID NO: 2100 - DNA, 20 bp, Artificial Sequence
  Description of Artificial Sequence: Synthetic primer
taggagtcgatgctgaccaa

SEQ ID NO: 2101 - DNA, 45 bp, Artificial Sequence
  Description of Artificial Sequence: Synthetic primer
  Description of Combined DNA/RNA Molecule: Synthetic primer
taggagtcgatgctgaccaaggtgcctctgctctgggactggagt

SEQ ID NO: 2102 - DNA, 38 bp, Artificial Sequence
  Description of Artificial Sequence: Synthetic primer
  Description of Combined DNA/RNA Molecule: Synthetic primer
acgacgacgacgaagcagctgaggcaggctccacagat

SEQ ID NO: 2103 - DNA, 39 bp, Artificial Sequence
  Description of Artificial Sequence: Synthetic primer
  Description of Combined DNA/RNA Molecule: Synthetic primer
acgacgacgacgaagctgaggcaggctccacagaccccg

SEQ ID NO: 2104 - DNA, 64 bp, Artificial Sequence
  Description of Artificial Sequence: Synthetic primer
  Description of Combined DNA/RNA Molecule: Synthetic primer
acgacgacgacttgacgaacataatggtttttttcatatcactagcagtgtgatggttactgga

SEQ ID NO: 2105 - DNA, 50 bp, Artificial Sequence
  Description of Artificial Sequence: Synthetic oligonucleotide
  Description of Combined DNA/RNA Molecule: Synthetic oligonucleotide
tacatgccatcccacgacaccaagccagagtgggatttaacaacagccga

SEQ ID NO: 2106 - DNA, 44 bp, Artificial Sequence
  Description of Artificial Sequence: Synthetic oligonucleotide
gccagtgcactgtgcttggtcaacctgtgtcggagcggttacta

SEQ ID NO: 2107 - DNA, 27 bp, Artificial Sequence
  Description of Artificial Sequence: Synthetic probe
aaaacaacagccagtgcactgtgcttg

SEQ ID NO: 2108 - DNA, 19 bp, Artificial Sequence
  Description of Artificial Sequence: Synthetic primer
tacatgccatcccacgaca

SEQ ID NO: 2109 - DNA, 19 bp, Artificial Sequence
  Description of Artificial Sequence: Synthetic primer
tagtaaccgctccgacaca

SEQ ID NO: 2110 - DNA, 57 bp, Artificial Sequence
  Description of Artificial Sequence: Synthetic primer
  Description of Combined DNA/RNA Molecule: Synthetic primer
tagtaaccgctccgacacattttttcatatcactagcagtgtgatggttattgggac

SEQ ID NO: 2111 - DNA, 34 bp, Artificial Sequence
  Description of Artificial Sequence: Synthetic primer
  Description of Combined DNA/RNA Molecule: Synthetic primer
acgacgacgacgaaggccagggcagcccagccag

SEQ ID NO: 2112 - DNA, 52 bp, Artificial Sequence
  Description of Artificial Sequence: Synthetic primer
  Description of Combined DNA/RNA Molecule: Synthetic primer
acgacgacgacttgacgaacataatcctcactctgctctcctgtgcccaggt

SEQ ID NO: 2113 - DNA, 50 bp, Artificial Sequence
  Description of Artificial Sequence: Synthetic oligonucleotide
  Description of Combined DNA/RNA Molecule: Synthetic oligonucleotide
tccaaacaagctgatccgtacagccaacctcaagaggttcccgcauccct

SEQ ID NO: 2114 - DNA, 45 bp, Artificial Sequence
  Description of Artificial Sequence: Synthetic oligonucleotide
tcctctccccaccctgcctaggagtgtgtgtcggagcggttacta

SEQ ID NO: 2115 - DNA, 22 bp, Artificial Sequence
  Description of Artificial Sequence: Synthetic probe
aatcccgcatcctctccccacc

SEQ ID NO: 2116 - DNA, 22 bp, Artificial Sequence
  Description of Artificial Sequence: Synthetic primer
tccaaacaagctgatccgtaca

SEQ ID NO: 2117 - DNA, 19 bp, Artificial Sequence
  Description of Artificial Sequence: Synthetic primer
tagtaaccgctccgacaca

SEQ ID NO: 2118 - DNA, 42 bp, Artificial Sequence
  Description of Artificial Sequence: Synthetic primer
  Description of Combined DNA/RNA Molecule: Synthetic primer
tagtaaccgctccgacacactcctgtgcccaggccttgacat

SEQ ID NO: 2119 - DNA, 38 bp, Artificial Sequence
  Description of Artificial Sequence: Synthetic primer
  Description of Combined DNA/RNA Molecule: Synthetic primer
acgacgacgacgaacacccacccacagcctccaaggga

SEQ ID NO: 2120 - DNA, 38 bp, Artificial Sequence
  Description of Artificial Sequence: Synthetic primer
  Description of Combined DNA/RNA Molecule: Synthetic primer
acgacgacgacgaaagtcccacccacccacagcctccg

SEQ ID NO: 2121 - DNA, 52 bp, Artificial Sequence
  Description of Artificial Sequence: Synthetic primer
  Description of Combined DNA/RNA Molecule: Synthetic primer
acgacgacgacttgacgaacataatcccaaacttctactggcctggcutgcg

SEQ ID NO: 2122 - DNA, 47 bp, Artificial Sequence
  Description of Artificial Sequence: Synthetic oligonucleotide
  Description of Combined DNA/RNA Molecule: Synthetic oligonucleotide
tagggcgacagttaccacaacagccagggcattctccacgcactcga

SEQ ID NO: 2123 - DNA, 48 bp, Artificial Sequence
  Description of Artificial Sequence: Synthetic oligonucleotide
ctcagctacctgcaggagttcaccactgttgtgggtctcgctcgtata

SEQ ID NO: 2124 - DNA, 25 bp, Artificial Sequence
  Description of Artificial Sequence: Synthetic probe
aaccacgcactcagctacctgcagg

SEQ ID NO: 2125 - DNA, 20 bp, Artificial Sequence
  Description of Artificial Sequence: Synthetic primer
tagggcgacagttaccacaa

SEQ ID NO: 2126 - DNA, 20 bp, Artificial Sequence
  Description of Artificial Sequence: Synthetic primer
tatacgagcgagacccacaa

SEQ ID NO: 2127 - DNA, 43 bp, Artificial Sequence
  Description of Artificial Sequence: Synthetic primer
  Description of Combined DNA/RNA Molecule: Synthetic primer
tatacgagcgagacccacaaggcctggcttgcagtgatgaact

SEQ ID NO: 2128 - DNA, 40 bp, Artificial Sequence
  Description of Artificial Sequence: Synthetic primer
  Description of Combined DNA/RNA Molecule: Synthetic primer
acgacgacgacgaaccagcccacacctctccatcactcct

SEQ ID NO: 2129 - DNA, 41 bp, Artificial Sequence
  Description of Artificial Sequence: Synthetic primer
  Description of Combined DNA/RNA Molecule: Synthetic primer
acgacgacgacgaaagcccacacctctccatcactccctct

SEQ ID NO: 2130 - DNA, 50 bp, Artificial Sequence
  Description of Artificial Sequence: Synthetic primer
  Description of Combined DNA/RNA Molecule: Synthetic primer
acgacgacgacttgacgaacataatctgtgcctccctctgccactggtgt

SEQ ID NO: 2131 - DNA, 48 bp, Artificial Sequence
  Description of Artificial Sequence: Synthetic oligonucleotide
  Description of Combined DNA/RNA Molecule: Synthetic oligonucleotide
tccgactttagtgcgtcacaacaactcctccaagctctggacagaatc

SEQ ID NO: 2132 - DNA, 53 bp, Artificial Sequence
  Description of Artificial Sequence: Synthetic oligonucleotide
gaacttgattctgcctcaccagcttcaggcatcttgtgggtctcgctcgtata

SEQ ID NO: 2133 - DNA, 31 bp, Artificial Sequence
  Description of Artificial Sequence: Synthetic probe
aactggacagaacttgattctgcctcaccag

SEQ ID NO: 2134 - DNA, 21 bp, Artificial Sequence
  Description of Artificial Sequence: Synthetic primer
tccgactttagtgcgtcacaa

SEQ ID NO: 2135 - DNA, 20 bp, Artificial Sequence
  Description of Artificial Sequence: Synthetic primer
tatacgagcgagacccacaa

SEQ ID NO: 2136 - DNA, 44 bp, Artificial Sequence
  Description of Artificial Sequence: Synthetic primer
  Description of Combined DNA/RNA Molecule: Synthetic primer
tatacgagcgagacccacaatgtgcctccctctgccattggtgt

SEQ ID NO: 2137 - DNA, 40 bp, Artificial Sequence
  Description of Artificial Sequence: Synthetic primer
  Description of Combined DNA/RNA Molecule: Synthetic primer
acgacgacgacgaagctacagtggcagtggcagcagcagt

SEQ ID NO: 2138 - DNA, 40 bp, Artificial Sequence
  Description of Artificial Sequence: Synthetic primer
  Description of Combined DNA/RNA Molecule: Synthetic primer
acgacgacgacgaagcagctgctacagtggcagtggcagt

SEQ ID NO: 2139 - DNA, 48 bp, Artificial Sequence
  Description of Artificial Sequence: Synthetic primer
  Description of Combined DNA/RNA Molecule: Synthetic primer
acgacgacgacttgacgaacataatcctctggcctgtgtggccccagt

SEQ ID NO: 2140 - DNA, 45 bp, Artificial Sequence
  Description of Artificial Sequence: Synthetic oligonucleotide
  Description of Combined DNA/RNA Molecule: Synthetic oligonucleotide
tcaaacaaaggcgaccacaacgcagctgctgctgagctcaggcga

SEQ ID NO: 2141 - DNA, 41 bp, Artificial Sequence
  Description of Artificial Sequence: Synthetic oligonucleotide
ggcagcagcagggaccccagttgtcgcataggcagttcata

SEQ ID NO: 2142 - DNA, 24 bp, Artificial Sequence
  Description of Artificial Sequence: Synthetic probe
aagagctcaggcagcagcagggac

SEQ ID NO: 2143 - DNA, 21 bp, Artificial Sequence
  Description of Artificial Sequence: Synthetic primer
tcaaacaaaggcgaccacaac

SEQ ID NO: 2144 - DNA, 22 bp, Artificial Sequence
  Description of Artificial Sequence: Synthetic primer
tatgaactgcctatgcgacaac

SEQ ID NO: 2145 - DNA, 45 bp, Artificial Sequence
  Description of Artificial Sequence: Synthetic primer
  Description of Combined DNA/RNA Molecule: Synthetic primer
tatgaactgcctatgcgacaaccctgtgtggccccagcttgggat

SEQ ID NO: 2146 - DNA, 40 bp, Artificial Sequence
  Description of Artificial Sequence: Synthetic primer
  Description of Combined DNA/RNA Molecule: Synthetic primer
acgacgacgacgaattcctggccagtccaggttcauccta

SEQ ID NO: 2147 - DNA, 41 bp, Artificial Sequence
  Description of Artificial Sequence: Synthetic primer
  Description of Combined DNA/RNA Molecule: Synthetic primer
acgacgacgacgaacctggccagtccaggttcatccuggag

SEQ ID NO: 2148 - DNA, 57 bp, Artificial Sequence
  Description of Artificial Sequence: Synthetic primer
  Description of Combined DNA/RNA Molecule: Synthetic primer
acgacgacgacttgacgaacataatgacagctggcaggtagtaaaactggaagccta

SEQ ID NO: 2149 - DNA, 48 bp, Artificial Sequence
  Description of Artificial Sequence: Synthetic oligonucleotide
  Description of Combined DNA/RNA Molecule: Synthetic oligonucleotide
taaacaatgagacccgctgaacgcacagtcacctccactgtcaccact

SEQ ID NO: 2150 - DNA, 59 bp, Artificial Sequence
  Description of Artificial Sequence: Synthetic oligonucleotide
ccatctcctcatcattcaaatgcaccttgaccaagacgttgtcgcataggcagttcata

SEQ ID NO: 2151 - DNA, 34 bp, Artificial Sequence
  Description of Artificial Sequence: Synthetic probe
ttactgtcaccatctcctcatcattcaaatgcac

SEQ ID NO: 2152 - DNA, 22 bp, Artificial Sequence
  Description of Artificial Sequence: Synthetic primer
taaacaatgagacccgctgaac

SEQ ID NO: 2153 - DNA, 22 bp, Artificial Sequence
  Description of Artificial Sequence: Synthetic primer
tatgaactgcctatgcgacaac

SEQ ID NO: 2154 - DNA, 52 bp, Artificial Sequence
  Description of Artificial Sequence: Synthetic primer
  Description of Combined DNA/RNA Molecule: Synthetic primer
tatgaactgcctatgcgacaactggcaggtagtaaaactggaagcttgtctc

SEQ ID NO: 2155 - DNA, 43 bp, Artificial Sequence
  Description of Artificial Sequence: Synthetic primer
  Description of Combined DNA/RNA Molecule: Synthetic primer
acgacgacgacgaagcacaggcagaaagatcaagcacagcact

SEQ ID NO: 2156 - DNA, 43 bp, Artificial Sequence
  Description of Artificial Sequence: Synthetic primer
  Description of Combined DNA/RNA Molecule: Synthetic primer
acgacgacgacgaacaggcagaaagatcaagcacagcaccccg

SEQ ID NO: 2157 - DNA, 48 bp, Artificial Sequence
  Description of Artificial Sequence: Synthetic primer
  Description of Combined DNA/RNA Molecule: Synthetic primer
acgacgacgacttgacgaacataatcctgcaccagcctgctgccctgc

SEQ ID NO: 2158 - DNA, 50 bp, Artificial Sequence
  Description of Artificial Sequence: Synthetic oligonucleotide
  Description of Combined DNA/RNA Molecule: Synthetic oligonucleotide
tctgccagaacaccgacaccatgacaggatgggacagattcctcaggcct

SEQ ID NO: 2159 - DNA, 42 bp, Artificial Sequence
  Description of Artificial Sequence: Synthetic oligonucleotide
ggctccaaggccctaggatggcagtgtgttggcgtacggtga

SEQ ID NO: 2160 - DNA, 26 bp, Artificial Sequence
  Description of Artificial Sequence: Synthetic probe
ccttcctcaggctccaaggccctagg

SEQ ID NO: 2161 - DNA, 19 bp, Artificial Sequence
  Description of Artificial Sequence: Synthetic primer
tctgccagaacaccgacac

SEQ ID NO: 2162 - DNA, 19 bp, Artificial Sequence
  Description of Artificial Sequence: Synthetic primer
tcaccgtacgccaacacac

SEQ ID NO: 2163 - DNA, 41 bp, Artificial Sequence
  Description of Artificial Sequence: Synthetic primer
  Description of Combined DNA/RNA Molecule: Synthetic primer
tcaccgtacgccaacacacacagggcagcaggctaggccac

SEQ ID NO: 2164 - DNA, 38 bp, Artificial Sequence
  Description of Artificial Sequence: Synthetic primer
  Description of Combined DNA/RNA Molecule: Synthetic primer
acgacgacgacgaagaaccagccccctccaccagcact

SEQ ID NO: 2165 - DNA, 39 bp, Artificial Sequence
  Description of Artificial Sequence: Synthetic primer
  Description of Combined DNA/RNA Molecule: Synthetic primer
acgacgacgacgaacagcagccatggaaccagccccctt

SEQ ID NO: 2166 - DNA, 52 bp, Artificial Sequence
  Description of Artificial Sequence: Synthetic primer
  Description of Combined DNA/RNA Molecule: Synthetic primer
acgacgacgacttgacgaacataatcctgatgcattggtgccagtgcuggga

SEQ ID NO: 2167 - DNA, 42 bp, Artificial Sequence
  Description of Artificial Sequence: Synthetic oligonucleotide
  Description of Combined DNA/RNA Molecule: Synthetic oligonucleotide
tccggatcaaagcagccacaccaagctgcagccctcactccc

SEQ ID NO: 2168 - DNA, 54 bp, Artificial Sequence
  Description of Artificial Sequence: Synthetic oligonucleotide
ctcttcaccaacacctcagacacctaccctagcacgtgtgttggcgtacggtga

SEQ ID NO: 2169 - DNA, 30 bp, Artificial Sequence
  Description of Artificial Sequence: Synthetic probe
ttgccctcactcttcaccaacacctcagac

SEQ ID NO: 2170 - DNA, 19 bp, Artificial Sequence
  Description of Artificial Sequence: Synthetic primer
tccggatcaaagcagccac

SEQ ID NO: 2171 - DNA, 19 bp, Artificial Sequence
  Description of Artificial Sequence: Synthetic primer
tcaccgtacgccaacacac

SEQ ID NO: 2172 - DNA, 42 bp, Artificial Sequence
  Description of Artificial Sequence: Synthetic primer
  Description of Combined DNA/RNA Molecule: Synthetic primer
tcaccgtacgccaacacacgccagtgctggagcagatgctaa

SEQ ID NO: 2173 - DNA, 45 bp, Artificial Sequence
  Description of Artificial Sequence: Synthetic primer
  Description of Combined DNA/RNA Molecule: Synthetic primer
acgacgacgacgaagacctcccccaactctttactatgcaugtcg

SEQ ID NO: 2174 - DNA, 47 bp, Artificial Sequence
  Description of Artificial Sequence: Synthetic primer
  Description of Combined DNA/RNA Molecule: Synthetic primer
acgacgacgacgaacctcccccaactctttactatgcatgtcaacta

SEQ ID NO: 2175 - DNA, 46 bp, Artificial Sequence
  Description of Artificial Sequence: Synthetic primer
  Description of Combined DNA/RNA Molecule: Synthetic primer
acgacgacgacttgacgaacataatgcacagggccctgcccaacta

SEQ ID NO: 2176 - DNA, 46 bp, Artificial Sequence
  Description of Artificial Sequence: Synthetic oligonucleotide
  Description of Combined DNA/RNA Molecule: Synthetic oligonucleotide
ttctagataccacggacgcacgccacaagggcataccctcaaggga

SEQ ID NO: 2177 - DNA, 44 bp, Artificial Sequence
  Description of Artificial Sequence: Synthetic oligonucleotide
agaggtacagggctagggctaggcgtgttggtgtgcaaagctga

SEQ ID NO: 2178 - DNA, 26 bp, Artificial Sequence
  Description of Artificial Sequence: Synthetic probe
ccaccctcaagaggtacagggctagg

SEQ ID NO: 2179 - DNA, 21 bp, Artificial Sequence
  Description of Artificial Sequence: Synthetic primer
ttctagataccacggacgcac

SEQ ID NO: 2180 - DNA, 20 bp, Artificial Sequence
  Description of Artificial Sequence: Synthetic primer
tcagctttgcacaccaacac

SEQ ID NO: 2181 - DNA, 43 bp, Artificial Sequence
  Description of Artificial Sequence: Synthetic primer
  Description of Combined DNA/RNA Molecule: Synthetic primer
tcagctttgcacaccaacacacagggccctgcccaattgcacg

SEQ ID NO: 2182 - DNA, 41 bp, Artificial Sequence
  Description of Artificial Sequence: Synthetic primer
  Description of Combined DNA/RNA Molecule: Synthetic primer
acgacgacgacgaacagctggaccaaggccacatcautccc

SEQ ID NO: 2183 - DNA, 42 bp, Artificial Sequence
  Description of Artificial Sequence: Synthetic primer
  Description of Combined DNA/RNA Molecule: Synthetic primer
acgacgacgacgaactggaccaaggccacatcattccugggt

SEQ ID NO: 2184 - DNA, 52 bp, Artificial Sequence
  Description of Artificial Sequence: Synthetic primer
  Description of Combined DNA/RNA Molecule: Synthetic primer
acgacgacgacttgacgaacataatctgggactgatggcctgcctaaggaga

SEQ ID NO: 2185 - DNA, 49 bp, Artificial Sequence
  Description of Artificial Sequence: Synthetic oligonucleotide
  Description of Combined DNA/RNA Molecule: Synthetic oligonucleotide
tatgcggaccgatgactcaacccagacccagactcccaatttcagagct

SEQ ID NO: 2186 - DNA, 58 bp, Artificial Sequence
  Description of Artificial Sequence: Synthetic oligonucleotide
gagtcacagcccaggacacaaaaagactctacactgttgcttggcttgatctacctga

SEQ ID NO: 2187 - DNA, 35 bp, Artificial Sequence
  Description of Artificial Sequence: Synthetic probe
ttaatttcagagtcacagcccaggacacaaaaaga

SEQ ID NO: 2188 - DNA, 20 bp, Artificial Sequence
  Description of Artificial Sequence: Synthetic primer
tatgcggaccgatgactcaa

SEQ ID NO: 2189 - DNA, 22 bp, Artificial Sequence
  Description of Artificial Sequence: Synthetic primer
tcaggtagatcaagccaagcaa

SEQ ID NO: 2190 - DNA, 49 bp, Artificial Sequence
  Description of Artificial Sequence: Synthetic primer
  Description of Combined DNA/RNA Molecule: Synthetic primer
tcaggtagatcaagccaagcaagatggcctgcctaaggaggaatgtggc

SEQ ID NO: 2191 - DNA, 37 bp, Artificial Sequence
  Description of Artificial Sequence: Synthetic primer
  Description of Combined DNA/RNA Molecule: Synthetic primer
acgacgacgacgaagcagcagcagcagtggcacaggg

SEQ ID NO: 2192 - DNA, 41 bp, Artificial Sequence
  Description of Artificial Sequence: Synthetic primer
  Description of Combined DNA/RNA Molecule: Synthetic primer
acgacgacgacgaaagcagcagtggcacaggagatccagac

SEQ ID NO: 2193 - DNA, 53 bp, Artificial Sequence
  Description of Artificial Sequence: Synthetic primer
  Description of Combined DNA/RNA Molecule: Synthetic primer
acgacgacgacttgacgaacataataggaaggagaaggtgctgtgctcutgcc

SEQ ID NO: 2194 - DNA, 49 bp, Artificial Sequence
  Description of Artificial Sequence: Synthetic oligonucleotide
  Description of Combined DNA/RNA Molecule: Synthetic oligonucleotide
ttcgtgggcacacaagcaaactgctagagaacatggctcccgcagggat

SEQ ID NO: 2195 - DNA, 46 bp, Artificial Sequence
  Description of Artificial Sequence: Synthetic oligonucleotide
gaggcactcagagccaccacacagttgcttggcttgatctacctga

SEQ ID NO: 2196 - DNA, 22 bp, Artificial Sequence
  Description of Artificial Sequence: Synthetic probe
tttcccgcagaggcactcagag

SEQ ID NO: 2197 - DNA, 19 bp, Artificial Sequence
  Description of Artificial Sequence: Synthetic primer
ttcgtgggcacacaagcaa

SEQ ID NO: 2198 - DNA, 22 bp, Artificial Sequence
  Description of Artificial Sequence: Synthetic primer
tcaggtagatcaagccaagcaa

SEQ ID NO: 2199 - DNA, 50 bp, Artificial Sequence
  Description of Artificial Sequence: Synthetic primer
  Description of Combined DNA/RNA Molecule: Synthetic primer
tcaggtagatcaagccaagcaatgtgctcttgctacctgtgtgatggctt

SEQ ID NO: 2200 - DNA, 38 bp, Artificial Sequence
  Description of Artificial Sequence: Synthetic primer
  Description of Combined DNA/RNA Molecule: Synthetic primer
acgacgacgacgaaccaggcaccagagcaggcacagcg

SEQ ID NO: 2201 - DNA, 40 bp, Artificial Sequence
  Description of Artificial Sequence: Synthetic primer
  Description of Combined DNA/RNA Molecule: Synthetic primer
acgacgacgacgaaacatctgccaggcaccagagcaggcg

SEQ ID NO: 2202 - DNA, 50 bp, Artificial Sequence
  Description of Artificial Sequence: Synthetic primer
  Description of Combined DNA/RNA Molecule: Synthetic primer
acgacgacgacttgacgaacataatcctggcagcagtggtggtggutgcg

SEQ ID NO: 2203 - DNA, 45 bp, Artificial Sequence
  Description of Artificial Sequence: Synthetic oligonucleotide
  Description of Combined DNA/RNA Molecule: Synthetic oligonucleotide
ttgaaggaggaaatcggcacaaagcagggcaagcagtacaccctt

SEQ ID NO: 2204 - DNA, 44 bp, Artificial Sequence
  Description of Artificial Sequence: Synthetic oligonucleotide
ccccccagccacatcctgagcctgtcgaaccgttttaggactga

SEQ ID NO: 2205 - DNA, 25 bp, Artificial Sequence
  Description of Artificial Sequence: Synthetic probe
ttcagtacaccccccagccacatcc

SEQ ID NO: 2206 - DNA, 21 bp, Artificial Sequence
  Description of Artificial Sequence: Synthetic primer
ttgaaggaggaaatcggcaca

SEQ ID NO: 2207 - DNA, 22 bp, Artificial Sequence
  Description of Artificial Sequence: Synthetic primer
tcagtcctaaaacggttcgaca

SEQ ID NO: 2208 - DNA, 47 bp, Artificial Sequence
  Description of Artificial Sequence: Synthetic primer
  Description of Combined DNA/RNA Molecule: Synthetic primer
tcagtcctaaaacggttcgacagcagcagtggtggtggtgatgccta

SEQ ID NO: 2209 - DNA, 53 bp, Artificial Sequence
  Description of Artificial Sequence: Synthetic primer
  Description of Combined DNA/RNA Molecule: Synthetic primer
acgacgacgacgaaccaacctgaacttcatttttataaacatcccacaatgaa

SEQ ID NO: 2210 - DNA, 54 bp, Artificial Sequence
  Description of Artificial Sequence: Synthetic primer
  Description of Combined DNA/RNA Molecule: Synthetic primer
acgacgacgacgaactgaacttcatttttataaacatcccacaatgagcuaact

SEQ ID NO: 2211 - DNA, 52 bp, Artificial Sequence
  Description of Artificial Sequence: Synthetic primer
  Description of Combined DNA/RNA Molecule: Synthetic primer
acgacgacgacttgacgaacataatttctctctggtttgcttgctccugcct

SEQ ID NO: 2212 - DNA, 41 bp, Artificial Sequence
  Description of Artificial Sequence: Synthetic oligonucleotide
  Description of Combined DNA/RNA Molecule: Synthetic oligonucleotide
ttcggcaggctacggtacaggagggcaggcaggtcagagat

SEQ ID NO: 2213 - DNA, 47 bp, Artificial Sequence
  Description of Artificial Sequence: Synthetic oligonucleotide
gaggcaggaggctcacagagggagatgtcgaaccgttttaggactga

SEQ ID NO: 2214 - DNA, 27 bp, Artificial Sequence
  Description of Artificial Sequence: Synthetic probe
ttcaggtcagaggcaggaggctcacag

SEQ ID NO: 2215 - DNA, 19 bp, Artificial Sequence
  Description of Artificial Sequence: Synthetic primer
ttcggcaggctacggtaca

SEQ ID NO: 2216 - DNA, 22 bp, Artificial Sequence
  Description of Artificial Sequence: Synthetic primer
tcagtcctaaaacggttcgaca

SEQ ID NO: 2217 - DNA, 50 bp, Artificial Sequence
  Description of Artificial Sequence: Synthetic primer
  Description of Combined DNA/RNA Molecule: Synthetic primer
tcagtcctaaaacggttcgacattctctctggtttgcttgctcttgcccc

SEQ ID NO: 2218 - DNA, 42 bp, Artificial Sequence
  Description of Artificial Sequence: Synthetic primer
  Description of Combined DNA/RNA Molecule: Synthetic primer
acgacgacgacgaagaagtgcacagtgccacagaccaacacg

SEQ ID NO: 2219 - DNA, 41 bp, Artificial Sequence
  Description of Artificial Sequence: Synthetic primer
  Description of Combined DNA/RNA Molecule: Synthetic primer
acgacgacgacgaaggaagtgcacagtgccacagaccaacg

SEQ ID NO: 2220 - DNA, 51 bp, Artificial Sequence
  Description of Artificial Sequence: Synthetic primer
  Description of Combined DNA/RNA Molecule: Synthetic primer
acgacgacgacttgacgaacataatctcctgtgtgtggctcatgccutgcg

SEQ ID NO: 2221 - DNA, 54 bp, Artificial Sequence
  Description of Artificial Sequence: Synthetic oligonucleotide
  Description of Combined DNA/RNA Molecule: Synthetic oligonucleotide
tctcgacgatgaaaagcaacacactctagcatctgacactcagacttcacactt

SEQ ID NO: 2222 - DNA, 44 bp, Artificial Sequence
  Description of Artificial Sequence: Synthetic oligonucleotide
caccctcagccagatcccagagccctgtgggtactgtccgtgga

SEQ ID NO: 2223 - DNA, 29 bp, Artificial Sequence
  Description of Artificial Sequence: Synthetic probe
ttgacttcacaccctcagccagatcccag

SEQ ID NO: 2224 - DNA, 21 bp, Artificial Sequence
  Description of Artificial Sequence: Synthetic primer
tctcgacgatgaaaagcaaca

SEQ ID NO: 2225 - DNA, 19 bp, Artificial Sequence
  Description of Artificial Sequence: Synthetic primer
tccacggacagtacccaca

SEQ ID NO: 2226 - DNA, 44 bp, Artificial Sequence
  Description of Artificial Sequence: Synthetic primer
  Description of Combined DNA/RNA Molecule: Synthetic primer
tccacggacagtacccacaccttgcagtgggtggttgatgaata

SEQ ID NO: 2227 - DNA, 47 bp, Artificial Sequence
  Description of Artificial Sequence: Synthetic primer
  Description of Combined DNA/RNA Molecule: Synthetic primer
acgacgacgacgaacatcttccacttttgttgtctgagcacagccat

SEQ ID NO: 2228 - DNA, 48 bp, Artificial Sequence
  Description of Artificial Sequence: Synthetic primer
  Description of Combined DNA/RNA Molecule: Synthetic primer
acgacgacgacgaacaactgcagcatcttccacttttgttgtcugagt

SEQ ID NO: 2229 - DNA, 52 bp, Artificial Sequence; identical to SEQ ID NO: 1747
  Description of Artificial Sequence: Synthetic primer
  Description of Combined DNA/RNA Molecule: Synthetic primer

SEQ ID NO: 2230 - DNA, 47 bp, Artificial Sequence
  Description of Artificial Sequence: Synthetic oligonucleotide
  Description of Combined DNA/RNA Molecule: Synthetic oligonucleotide
ttctaggcgacacgacaacacacaggacaagggatgctgacaggcga

SEQ ID NO: 2231 - DNA, 40 bp, Artificial Sequence
  Description of Artificial Sequence: Synthetic oligonucleotide
ggcagcagaggcaagcaccactgtgggtactgtccgtgga

SEQ ID NO: 2232 - DNA, 21 bp, Artificial Sequence
  Description of Artificial Sequence: Synthetic probe
ccgctgacaggcagcagaggc

SEQ ID NO: 2233 - DNA, 20 bp, Artificial Sequence
  Description of Artificial Sequence: Synthetic primer
ttctaggcgacacgacaaca

SEQ ID NO: 2234 - DNA, 19 bp, Artificial Sequence
  Description of Artificial Sequence: Synthetic primer
tccacggacagtacccaca

SEQ ID NO: 2235 - DNA, 45 bp, Artificial Sequence
  Description of Artificial Sequence: Synthetic primer
  Description of Combined DNA/RNA Molecule: Synthetic primer
tccacggacagtacccacagagctgcctcttgcctgtgatgctta

SEQ ID NO: 2236 - DNA, 41 bp, Artificial Sequence
  Description of Artificial Sequence: Synthetic primer
  Description of Combined DNA/RNA Molecule: Synthetic primer
acgacgacgacgaactggagagccacagagaaggcaggctg

SEQ ID NO: 2237 - DNA, 41 bp, Artificial Sequence
  Description of Artificial Sequence: Synthetic primer
  Description of Combined DNA/RNA Molecule: Synthetic primer
acgacgacgacgaagcagctggagagccacagagaaggcaa

SEQ ID NO: 2238 - DNA, 49 bp, Artificial Sequence
  Description of Artificial Sequence: Synthetic primer
  Description of Combined DNA/RNA Molecule: Synthetic primer
acgacgacgacttgacgaacataatggctgcctgcaggatggtcaggta

SEQ ID NO: 2239 - DNA, 50 bp, Artificial Sequence
  Description of Artificial Sequence: Synthetic oligonucleotide
  Description of Combined DNA/RNA Molecule: Synthetic oligonucleotide
tttcaggccctaaccaccacctacaggcaacaagatggagagtcagcctg

SEQ ID NO: 2240 - DNA, 46 bp, Artificial Sequence
  Description of Artificial Sequence: Synthetic oligonucleotide
gcccaagagggacagaggccacactggtgggattaagggcgatgga

SEQ ID NO: 2241 - DNA, 27 bp, Artificial Sequence
  Description of Artificial Sequence: Synthetic probe
ttagagtcagcccaagagggacagagg

SEQ ID NO: 2242 - DNA, 20 bp, Artificial Sequence
  Description of Artificial Sequence: Synthetic primer
tttcaggccctaaccaccac

SEQ ID NO: 2243 - DNA, 20 bp, Artificial Sequence
  Description of Artificial Sequence: Synthetic primer
tccatcgcccttaatcccac

SEQ ID NO: 2244 - DNA, 44 bp, Artificial Sequence
  Description of Artificial Sequence: Synthetic primer
  Description of Combined DNA/RNA Molecule: Synthetic primer
tccatcgcccttaatcccaccccagcttgctgccagtatggccc

SEQ ID NO: 2245 - DNA, 36 bp, Artificial Sequence
  Description of Artificial Sequence: Synthetic primer
  Description of Combined DNA/RNA Molecule: Synthetic primer
acgacgacgacgaagcacccaagccccaccaccact

SEQ ID NO: 2246 - DNA, 37 bp, Artificial Sequence
  Description of Artificial Sequence: Synthetic primer
  Description of Combined DNA/RNA Molecule: Synthetic primer
acgacgacgacgaaacccaagccccaccaccacctct

SEQ ID NO: 2247 - DNA, 49 bp, Artificial Sequence
  Description of Artificial Sequence: Synthetic primer
  Description of Combined DNA/RNA Molecule: Synthetic primer
acgacgacgacttgacgaacataatgctcctggtgtgggtggccagtga

SEQ ID NO: 2248 - DNA, 45 bp, Artificial Sequence
  Description of Artificial Sequence: Synthetic oligonucleotide
  Description of Combined DNA/RNA Molecule: Synthetic oligonucleotide
tatctcctaaaagaagccgcaccccagcacacccctgtcacaccg

SEQ ID NO: 2249 - DNA, 52 bp, Artificial Sequence
  Description of Artificial Sequence: Synthetic oligonucleotide
cactacctgggcacctcagtcatcatcaccaagtgggattaagggcgatgga

SEQ ID NO: 2250 - DNA, 28 bp, Artificial Sequence
  Description of Artificial Sequence: Synthetic probe
ttcctgtcacactacctgggcacctcag

SEQ ID NO: 2251 - DNA, 22 bp, Artificial Sequence
  Description of Artificial Sequence: Synthetic primer
tatctcctaaaagaagccgcac

SEQ ID NO: 2252 - DNA, 20 bp, Artificial Sequence
  Description of Artificial Sequence: Synthetic primer
tccatcgcccttaatcccac

SEQ ID NO: 2253 - DNA, 44 bp, Artificial Sequence
  Description of Artificial Sequence: Synthetic primer
  Description of Combined DNA/RNA Molecule: Synthetic primer
tccatcgcccttaatcccacggccagtgggtcacctcttgttga

SEQ ID NO: 2254 - DNA, 43 bp, Artificial Sequence
  Description of Artificial Sequence: Synthetic primer
  Description of Combined DNA/RNA Molecule: Synthetic primer
acgacgacgacgaacacactgacaggtgagcacagacacacct

SEQ ID NO: 2255 - DNA, 43 bp, Artificial Sequence
  Description of Artificial Sequence: Synthetic primer
  Description of Combined DNA/RNA Molecule: Synthetic primer
acgacgacgacgaacactgacaggtgagcacagacacacccaa

SEQ ID NO: 2256 - DNA, 51 bp, Artificial Sequence
  Description of Artificial Sequence: Synthetic primer
  Description of Combined DNA/RNA Molecule: Synthetic primer
acgacgacgacttgacgaacataatggagggctgctgtgtgtggaactgaa

SEQ ID NO: 2257 - DNA, 46 bp, Artificial Sequence
  Description of Artificial Sequence: Synthetic oligonucleotide
  Description of Combined DNA/RNA Molecule: Synthetic oligonucleotide
tcgctcttcagcctcctacacagcagggatgtgagtggacagagaa

SEQ ID NO: 2258 - DNA, 49 bp, Artificial Sequence
  Description of Artificial Sequence: Synthetic oligonucleotide
gagggaagagggccacaaaccaacccatgttctgggaattattgccgga

SEQ ID NO: 2259 - DNA, 25 bp, Artificial Sequence
  Description of Artificial Sequence: Synthetic probe
ttgtggacagagggaagagggccac

SEQ ID NO: 2260 - DNA, 20 bp, Artificial Sequence
  Description of Artificial Sequence: Synthetic primer
tcgctcttcagcctcctaca

SEQ ID NO: 2261 - DNA, 22 bp, Artificial Sequence
  Description of Artificial Sequence: Synthetic primer
tccggcaataattcccagaaca

SEQ ID NO: 2262 - DNA, 50 bp, Artificial Sequence
  Description of Artificial Sequence: Synthetic primer
  Description of Combined DNA/RNA Molecule: Synthetic primer
tccggcaataattcccagaacaggctgctgtgtgtggaactgaatgggtt

SEQ ID NO: 2263 - DNA, 39 bp, Artificial Sequence
  Description of Artificial Sequence: Synthetic primer
  Description of Combined DNA/RNA Molecule: Synthetic primer
acgacgacgacgaagggacacagggcagtgaccaccaga

SEQ ID NO: 2264 - DNA, 39 bp, Artificial Sequence
  Description of Artificial Sequence: Synthetic primer
  Description of Combined DNA/RNA Molecule: Synthetic primer
acgacgacgacgaaacacagggcagtgaccaccaggctc

SEQ ID NO: 2265 - DNA, 54 bp, Artificial Sequence
  Description of Artificial Sequence: Synthetic primer
  Description of Combined DNA/RNA Molecule: Synthetic primer
acgacgacgacttgacgaacataatcccctgggaagtgtagtctggaatuagct

SEQ ID NO: 2266 - DNA, 45 bp, Artificial Sequence
  Description of Artificial Sequence: Synthetic oligonucleotide
  Description of Combined DNA/RNA Molecule: Synthetic oligonucleotide
ttcaacgatcgcgcagacaccactcctggcaaagccaacaccccg

SEQ ID NO: 2267 - DNA, 59 bp, Artificial Sequence
  Description of Artificial Sequence: Synthetic oligonucleotide
ccctatttctgaacaccacctccattccagactacactgttctgggaattattgccgga

SEQ ID NO: 2268 - DNA, 31 bp, Artificial Sequence
  Description of Artificial Sequence: Synthetic probe
ttgccaacaccctatttctgaacaccacctc

SEQ ID NO: 2269 - DNA, 19 bp, Artificial Sequence
  Description of Artificial Sequence: Synthetic primer
ttcaacgatcgcgcagaca

SEQ ID NO: 2270 - DNA, 22 bp, Artificial Sequence
  Description of Artificial Sequence: Synthetic primer
tccggcaataattcccagaaca

SEQ ID NO: 2271 - DNA, 51 bp, Artificial Sequence
  Description of Artificial Sequence: Synthetic primer
  Description of Combined DNA/RNA Molecule: Synthetic primer
tccggcaataattcccagaacacccctgggaagtgtagtctggagtggaga

SEQ ID NO: 2272 - DNA, 42 bp, Artificial Sequence
  Description of Artificial Sequence: Synthetic primer
  Description of Combined DNA/RNA Molecule: Synthetic primer
acgacgacgacgaaggatgggaagctgaagaggagcacaggc

SEQ ID NO: 2273 - DNA, 43 bp, Artificial Sequence
  Description of Artificial Sequence: Synthetic primer
  Description of Combined DNA/RNA Molecule: Synthetic primer
acgacgacgacgaagaagctgaagaggagcacaggtgaugctc

SEQ ID NO: 2274 - DNA, 52 bp, Artificial Sequence
  Description of Artificial Sequence: Synthetic primer
  Description of Combined DNA/RNA Molecule: Synthetic primer
acgacgacgacttgacgaacataatcttgctgtgcttgcctagtgccutctc

SEQ ID NO: 2275 - DNA, 46 bp, Artificial Sequence
  Description of Artificial Sequence: Synthetic oligonucleotide
  Description of Combined DNA/RNA Molecule: Synthetic oligonucleotide
tcactatcggcgtagtcaccacaaaggcagcagtggcatcaagggc

SEQ ID NO: 2276 - DNA, 41 bp, Artificial Sequence
  Description of Artificial Sequence: Synthetic oligonucleotide
aggatgcactgaggcccagggtggtgactttacccggagga

SEQ ID NO: 2277 - DNA, 24 bp, Artificial Sequence
  Description of Artificial Sequence: Synthetic probe
aaggcatcaaggatgcactgaggc

SEQ ID NO: 2278 - DNA, 21 bp, Artificial Sequence
  Description of Artificial Sequence: Synthetic primer
tcactatcggcgtagtcacca

SEQ ID NO: 2279 - DNA, 20 bp, Artificial Sequence
  Description of Artificial Sequence: Synthetic primer
tcctccgggtaaagtcacca

SEQ ID NO: 2280 - DNA, 46 bp, Artificial Sequence
  Description of Artificial Sequence: Synthetic primer
  Description of Combined DNA/RNA Molecule: Synthetic primer
tcctccgggtaaagtcaccagcctagtgccttcttgcccttgctct

SEQ ID NO: 2281 - DNA, 44 bp, Artificial Sequence
  Description of Artificial Sequence: Synthetic primer
  Description of Combined DNA/RNA Molecule: Synthetic primer
acgacgacgacgaaccccttctgagaagtgtcctcctcactctt

SEQ ID NO: 2282 - DNA, 47 bp, Artificial Sequence
  Description of Artificial Sequence: Synthetic primer
  Description of Combined DNA/RNA Molecule: Synthetic primer
acgacgacgacgaaccttctgagaagtgtcctcctcactctcutatg

SEQ ID NO: 2283 - DNA, 55 bp, Artificial Sequence
  Description of Artificial Sequence: Synthetic primer
  Description of Combined DNA/RNA Molecule: Synthetic primer
acgacgacgacttgacgaacataatctgaccttctcccaccttctgtgaaagcag

SEQ ID NO: 2284 - DNA, 50 bp, Artificial Sequence
  Description of Artificial Sequence: Synthetic oligonucleotide
  Description of Combined DNA/RNA Molecule: Synthetic oligonucleotide
tcatctgttcgtcagggtccattgccaaggtcagcacacacaccaagtac

SEQ ID NO: 2285 - DNA, 48 bp, Artificial Sequence
  Description of Artificial Sequence: Synthetic oligonucleotide
agtgtgccaggcatgtgcatggtttctgtggtgactttacccggagga

SEQ ID NO: 2286 - DNA, 26 bp, Artificial Sequence
  Description of Artificial Sequence: Synthetic probe
ttcacaccaagtgtgccaggcatgtg

SEQ ID NO: 2287 - DNA, 21 bp, Artificial Sequence
  Description of Artificial Sequence: Synthetic primer
tcatctgttcgtcagggtcca

SEQ ID NO: 2288 - DNA, 20 bp, Artificial Sequence
  Description of Artificial Sequence: Synthetic primer
tcctccgggtaaagtcacca

SEQ ID NO: 2289 - DNA, 53 bp, Artificial Sequence
  Description of Artificial Sequence: Synthetic primer
  Description of Combined DNA/RNA Molecule: Synthetic primer
tcctccgggtaaagtcaccagtgaaagcaatgacacagcagaaaccgtgcacg

SEQ ID NO: 2290 - DNA, 43 bp, Artificial Sequence
  Description of Artificial Sequence: Synthetic primer
  Description of Combined DNA/RNA Molecule: Synthetic primer
acgacgacgacgaacaggtttgcaagaaactgcccacacagtg

SEQ ID NO: 2291 - DNA, 45 bp, Artificial Sequence
  Description of Artificial Sequence: Synthetic primer
  Description of Combined DNA/RNA Molecule: Synthetic primer
acgacgacgacgaacaagagatctgcttccaggtttgcaagaaat

SEQ ID NO: 2292 - DNA, 45 bp, Artificial Sequence
  Description of Artificial Sequence: Synthetic primer
  Description of Combined DNA/RNA Molecule: Synthetic primer
acgacgacgacttgacgaacataatggccctgccctggccctgct

SEQ ID NO: 2293 - DNA, 43 bp, Artificial Sequence
  Description of Artificial Sequence: Synthetic oligonucleotide
  Description of Combined DNA/RNA Molecule: Synthetic oligonucleotide
ttcgtacctcggcacaccaggcaaagaggcaggttacagtgaa

SEQ ID NO: 2294 - DNA, 44 bp, Artificial Sequence
  Description of Artificial Sequence: Synthetic oligonucleotide
gtgaggaaaggccaggcattgggatggctccgttactctgtcga

SEQ ID NO: 2295 - DNA, 26 bp, Artificial Sequence
  Description of Artificial Sequence: Synthetic probe
ttggttacagtgaggaaaggccaggc

SEQ ID NO: 2296 - DNA, 19 bp, Artificial Sequence
  Description of Artificial Sequence: Synthetic primer
ttcgtacctcggcacacca

SEQ ID NO: 2297 - DNA, 20 bp, Artificial Sequence
  Description of Artificial Sequence: Synthetic primer
tcgacagagtaacggagcca

SEQ ID NO: 2298 - DNA, 41 bp, Artificial Sequence
  Description of Artificial Sequence: Synthetic primer
  Description of Combined DNA/RNA Molecule: Synthetic primer
tcgacagagtaacggagccagccctgccctggccttgcccg

SEQ ID NO: 2299 - DNA, 40 bp, Artificial Sequence
  Description of Artificial Sequence: Synthetic primer
  Description of Combined DNA/RNA Molecule: Synthetic primer
acgacgacgacgaaccagggcatcaggtgagcacactaga

SEQ ID NO: 2300 - DNA, 38 bp, Artificial Sequence
  Description of Artificial Sequence: Synthetic primer
  Description of Combined DNA/RNA Molecule: Synthetic primer
acgacgacgacgaatgccccagccagggcatcaggtgg

SEQ ID NO: 2301 - DNA, 55 bp, Artificial Sequence
  Description of Artificial Sequence: Synthetic primer
  Description of Combined DNA/RNA Molecule: Synthetic primer
acgacgacgacttgacgaacataatgaggaggaggatgtggaggatctgaggaga

SEQ ID NO: 2302 - DNA, 46 bp, Artificial Sequence
  Description of Artificial Sequence: Synthetic oligonucleotide
  Description of Combined DNA/RNA Molecule: Synthetic oligonucleotide
tctacagctagatgcggccactaggcccagcagcaagcgcacagct

SEQ ID NO: 2303 - DNA, 43 bp, Artificial Sequence
  Description of Artificial Sequence: Synthetic oligonucleotide
cagcccactcccacagccacagctggctccgttactctgtcga

SEQ ID NO: 2304 - DNA, 22 bp, Artificial Sequence
  Description of Artificial Sequence: Synthetic probe
ttaagcgcacagcccactccca

SEQ ID NO: 2305 - DNA, 20 bp, Artificial Sequence
  Description of Artificial Sequence: Synthetic primer
tctacagctagatgcggcca

SEQ ID NO: 2306 - DNA, 20 bp, Artificial Sequence
  Description of Artificial Sequence: Synthetic primer
tcgacagagtaacggagcca

SEQ ID NO: 2307 - DNA, 49 bp, Artificial Sequence
  Description of Artificial Sequence: Synthetic primer
  Description of Combined DNA/RNA Molecule: Synthetic primer
tcgacagagtaacggagccaatgtggaggatctgaggaggctatggcta

SEQ ID NO: 2308 - DNA, 46 bp, Artificial Sequence
  Description of Artificial Sequence: Synthetic primer
  Description of Combined DNA/RNA Molecule: Synthetic primer
acgacgacgacgaacaagcataacctccccactctaaaccautaga

SEQ ID NO: 2309 - DNA, 43 bp, Artificial Sequence
  Description of Artificial Sequence: Synthetic primer
  Description of Combined DNA/RNA Molecule: Synthetic primer
acgacgacgacgaaccaggacacccaagcataacctccccacc

SEQ ID NO: 2310 - DNA, 60 bp, Artificial Sequence
  Description of Artificial Sequence: Synthetic primer
  Description of Combined DNA/RNA Molecule: Synthetic primer
acgacgacgacttgacgaacataatgagatgtgggagtgttctcttgttttctgagtgta

SEQ ID NO: 2311 - DNA, 51 bp, Artificial Sequence
  Description of Artificial Sequence: Synthetic oligonucleotide
  Description of Combined DNA/RNA Molecule: Synthetic oligonucleotide
tagcgatagtaccgacagtcacgaatcagtggctggactcaccgcaucacg

SEQ ID NO: 2312 - DNA, 59 bp, Artificial Sequence
  Description of Artificial Sequence: Synthetic oligonucleotide
tcataaaagcataaactgtgacccaatgagtccacacacgtgcggaaacctatcgtcga

SEQ ID NO: 2313 - DNA, 33 bp, Artificial Sequence
  Description of Artificial Sequence: Synthetic probe
aacaccgcatcataaaagcataaactgtgaccc

SEQ ID NO: 2314 - DNA, 22 bp, Artificial Sequence
  Description of Artificial Sequence: Synthetic primer
tagcgatagtaccgacagtcac

SEQ ID NO: 2315 - DNA, 20 bp, Artificial Sequence
  Description of Artificial Sequence: Synthetic primer
tcgacgataggtttccgcac

SEQ ID NO: 2316 - DNA, 54 bp, Artificial Sequence
  Description of Artificial Sequence: Synthetic primer
  Description of Combined DNA/RNA Molecule: Synthetic primer
tcgacgataggtttccgcacgggagtgttctcttgttttctgagtgtatggacc

SEQ ID NO: 2317 - DNA, 41 bp, Artificial Sequence
  Description of Artificial Sequence: Synthetic primer
  Description of Combined DNA/RNA Molecule: Synthetic primer
acgacgacgacgaacacaggcaggctctagtaggcautctt

SEQ ID NO: 2318 - DNA, 40 bp, Artificial Sequence
  Description of Artificial Sequence: Synthetic primer
  Description of Combined DNA/RNA Molecule: Synthetic primer
acgacgacgacgaagggcacaggcaggctctagtaggcac

SEQ ID NO: 2319 - DNA, 49 bp, Artificial Sequence
  Description of Artificial Sequence: Synthetic primer
  Description of Combined DNA/RNA Molecule: Synthetic primer
acgacgacgacttgacgaacataatctgaggctgcttggctgcagaaga

SEQ ID NO: 2320 - DNA, 46 bp, Artificial Sequence
  Description of Artificial Sequence: Synthetic oligonucleotide
  Description of Combined DNA/RNA Molecule: Synthetic oligonucleotide
tccagggtatttggcgcaccctggttggctttggcacttcaggcgt

SEQ ID NO: 2321 - DNA, 42 bp, Artificial Sequence
  Description of Artificial Sequence: Synthetic oligonucleotide
ggcacagggccacagcttccaggtgcggaaacctatcgtcga

SEQ ID NO: 2322 - DNA, 24 bp, Artificial Sequence
  Description of Artificial Sequence: Synthetic probe
ttcacttcaggcacagggccacag

SEQ ID NO: 2323 - DNA, 19 bp, Artificial Sequence
  Description of Artificial Sequence: Synthetic primer
tccagggtatttggcgcac

SEQ ID NO: 2324 - DNA, 20 bp, Artificial Sequence
  Description of Artificial Sequence: Synthetic primer
tcgacgataggtttccgcac

SEQ ID NO: 2325 - DNA, 44 bp, Artificial Sequence
  Description of Artificial Sequence: Synthetic primer
  Description of Combined DNA/RNA Molecule: Synthetic primer
tcgacgataggtttccgcacgcttggctgcagaagggttggaaa

SEQ ID NO: 2326 - DNA, 39 bp, Artificial Sequence
  Description of Artificial Sequence: Synthetic primer
  Description of Combined DNA/RNA Molecule: Synthetic primer
acgacgacgacgaagccagcagtggagtagggcaccata

SEQ ID NO: 2327 - DNA, 40 bp, Artificial Sequence
  Description of Artificial Sequence: Synthetic primer
  Description of Combined DNA/RNA Molecule: Synthetic primer
acgacgacgacgaacagcagtggagtagggcaccaugaaa

SEQ ID NO: 2328 - DNA, 50 bp, Artificial Sequence
  Description of Artificial Sequence: Synthetic primer
  Description of Combined DNA/RNA Molecule: Synthetic primer
acgacgacgacttgacgaacataattgcctacctgctgggtgtgcugctc

SEQ ID NO: 2329 - DNA, 47 bp, Artificial Sequence
  Description of Artificial Sequence: Synthetic oligonucleotide
  Description of Combined DNA/RNA Molecule: Synthetic oligonucleotide
tccctcgtcatctcccttaccccagaccacagctgtgcatcaccatt

SEQ ID NO: 2330 - DNA, 45 bp, Artificial Sequence
  Description of Artificial Sequence: Synthetic oligonucleotide
ccaccacagagtaggccaggcacaggggtcttggtgatggagcga

SEQ ID NO: 2331 - DNA, 28 bp, Artificial Sequence
  Description of Artificial Sequence: Synthetic probe
aatgcatcaccaccacagagtaggccag

SEQ ID NO: 2332 - DNA, 21 bp, Artificial Sequence
  Description of Artificial Sequence: Synthetic primer
tccctcgtcatctcccttacc

SEQ ID NO: 2333 - DNA, 19 bp, Artificial Sequence
  Description of Artificial Sequence: Synthetic primer
tcgctccatcaccaagacc

SEQ ID NO: 2334 - DNA, 45 bp, Artificial Sequence
  Description of Artificial Sequence: Synthetic primer
  Description of Combined DNA/RNA Molecule: Synthetic primer
tcgctccatcaccaagacctacctgctgggtgtgctgcctggccc

SEQ ID NO: 2335 - DNA, 36 bp, Artificial Sequence
  Description of Artificial Sequence: Synthetic primer
  Description of Combined DNA/RNA Molecule: Synthetic primer
acgacgacgacgaacagcagcccagggcacacttct

SEQ ID NO: 2336 - DNA, 36 bp, Artificial Sequence
  Description of Artificial Sequence: Synthetic primer
  Description of Combined DNA/RNA Molecule: Synthetic primer
acgacgacgacgaaccacacccccagcagcccagga

SEQ ID NO: 2337 - DNA, 52 bp, Artificial Sequence
  Description of Artificial Sequence: Synthetic primer
  Description of Combined DNA/RNA Molecule: Synthetic primer
acgacgacgacttgacgaacataatgctggccctatcatggtgcagcattga

SEQ ID NO: 2338 - DNA, 53 bp, Artificial Sequence
  Description of Artificial Sequence: Synthetic oligonucleotide
  Description of Combined DNA/RNA Molecule: Synthetic oligonucleotide
tcataatgttgtcagcccgacccacagtaccagtggattcaccatacacagtt

SEQ ID NO: 2339 - DNA, 49 bp, Artificial Sequence
  Description of Artificial Sequence: Synthetic oligonucleotide
cagccagaagatggcacagacacacaaagcggtcttggtgatggagcga

SEQ ID NO: 2340 - DNA, 32 bp, Artificial Sequence
  Description of Artificial Sequence: Synthetic probe
ttccatacacagccagaagatggcacagacac

SEQ ID NO: 2341 - DNA, 22 bp, Artificial Sequence
  Description of Artificial Sequence: Synthetic primer
tcataatgttgtcagcccgacc

SEQ ID NO: 2342 - DNA, 19 bp, Artificial Sequence
  Description of Artificial Sequence: Synthetic primer
tcgctccatcaccaagacc

SEQ ID NO: 2343 - DNA, 48 bp, Artificial Sequence
  Description of Artificial Sequence: Synthetic primer
  Description of Combined DNA/RNA Molecule: Synthetic primer
tcgctccatcaccaagaccctggccctatcatggtgcagcactggtgc

SEQ ID NO: 2344 - DNA, 45 bp, Artificial Sequence
  Description of Artificial Sequence: Synthetic primer
  Description of Combined DNA/RNA Molecule: Synthetic primer
acgacgacgacgaactccctggatataagagcctcaggcauaaaa

SEQ ID NO: 2345 - DNA, 46 bp, Artificial Sequence
  Description of Artificial Sequence: Synthetic primer
  Description of Combined DNA/RNA Molecule: Synthetic primer
acgacgacgacgaaccctggatataagagcctcaggcataaagcat

SEQ ID NO: 2346 - DNA, 48 bp, Artificial Sequence
  Description of Artificial Sequence: Synthetic primer
  Description of Combined DNA/RNA Molecule: Synthetic primer
acgacgacgacttgacgaacataatggccctcctgggagctgaggccg

SEQ ID NO: 2347 - DNA, 47 bp, Artificial Sequence
  Description of Artificial Sequence: Synthetic oligonucleotide
  Description of Combined DNA/RNA Molecule: Synthetic oligonucleotide
tacgaatcacccgagagttcaacacaggctgggaggcaggcaggtct

SEQ ID NO: 2348 - DNA, 50 bp, Artificial Sequence
  Description of Artificial Sequence: Synthetic oligonucleotide
ggttctgcacctcaaggctcccagatggttgtgggtgggtataggtcaga

SEQ ID NO: 2349 - DNA, 26 bp, Artificial Sequence
  Description of Artificial Sequence: Synthetic probe
ttgcaggcaggttctgcacctcaagg

SEQ ID NO: 2350 - DNA, 22 bp, Artificial Sequence
  Description of Artificial Sequence: Synthetic primer
tacgaatcacccgagagttcaa

SEQ ID NO: 2351 - DNA, 22 bp, Artificial Sequence
  Description of Artificial Sequence: Synthetic primer
tctgacctatacccacccacaa

SEQ ID NO: 2352 - DNA, 47 bp, Artificial Sequence
  Description of Artificial Sequence: Synthetic primer
  Description of Combined DNA/RNA Molecule: Synthetic primer
tctgacctatacccacccacaacctgggagctgaggccatttgggaa

SEQ ID NO: 2353 - DNA, 37 bp, Artificial Sequence
  Description of Artificial Sequence: Synthetic primer
  Description of Combined DNA/RNA Molecule: Synthetic primer
acgacgacgacgaaggcccatcacaccccccacccta

SEQ ID NO: 2354 - DNA, 40 bp, Artificial Sequence
  Description of Artificial Sequence: Synthetic primer
  Description of Combined DNA/RNA Molecule: Synthetic primer
acgacgacgacgaaacacaagggcccatcacaccccccat

SEQ ID NO: 2355 - DNA, 57 bp, Artificial Sequence
  Description of Artificial Sequence: Synthetic primer
  Description of Combined DNA/RNA Molecule: Synthetic primer
acgacgacgacttgacgaacataatatggtgtagaggaaactgattgaggacugggc

SEQ ID NO: 2356 - DNA, 46 bp, Artificial Sequence
  Description of Artificial Sequence: Synthetic oligonucleotide
  Description of Combined DNA/RNA Molecule: Synthetic oligonucleotide
tacgaatcacccgagagttcaaccccacctcaccctccgcaucctc

SEQ ID NO: 2357 - DNA, 51 bp, Artificial Sequence
  Description of Artificial Sequence: Synthetic oligonucleotide
tccctgcacccccaagtcacactaagaacttgtgggtgggtataggtcaga

SEQ ID NO: 2358 - DNA, 21 bp, Artificial Sequence
  Description of Artificial Sequence: Synthetic probe
ttctccgcatccctgcacccc

SEQ ID NO: 2359 - DNA, 22 bp, Artificial Sequence
  Description of Artificial Sequence: Synthetic primer
tacgaatcacccgagagttcaa

SEQ ID NO: 2360 - DNA, 22 bp, Artificial Sequence
  Description of Artificial Sequence: Synthetic primer
tctgacctatacccacccacaa

SEQ ID NO: 2361 - DNA, 53 bp, Artificial Sequence
  Description of Artificial Sequence: Synthetic primer
  Description of Combined DNA/RNA Molecule: Synthetic primer
tctgacctatacccacccacaactgattgaggactgggttcttagtatgactc

SEQ ID NO: 2362 - DNA, 46 bp, Artificial Sequence
  Description of Artificial Sequence: Synthetic primer
  Description of Combined DNA/RNA Molecule: Synthetic primer
acgacgacgacgaagttgtcctcagaaacatcactggcacagagga

SEQ ID NO: 2363 - DNA, 46 bp, Artificial Sequence
  Description of Artificial Sequence: Synthetic primer
  Description of Combined DNA/RNA Molecule: Synthetic primer
acgacgacgacgaagggaggtgttgtcctcagaaacatcacuggcg

SEQ ID NO: 2364 - DNA, 58 bp, Artificial Sequence
  Description of Artificial Sequence: Synthetic primer
  Description of Combined DNA/RNA Molecule: Synthetic primer
acgacgacgacttgacgaacataatcctgaatgttcatcctgtgtgcagtttcugagg

SEQ ID NO: 2365 - DNA, 50 bp, Artificial Sequence
  Description of Artificial Sequence: Synthetic oligonucleotide
  Description of Combined DNA/RNA Molecule: Synthetic oligonucleotide
taggaacacggaggacatcaaagggatggttcagcactttagacauctac

SEQ ID NO: 2366 - DNA, 55 bp, Artificial Sequence
  Description of Artificial Sequence: Synthetic oligonucleotide
tctgtcacagacctatctgcaggtcaccttcacttgtgggtgggtataggtcaga

SEQ ID NO: 2367 - DNA, 33 bp, Artificial Sequence
  Description of Artificial Sequence: Synthetic probe
aattagacatctgtcacagacctatctgcaggt

SEQ ID NO: 2368 - DNA, 21 bp, Artificial Sequence
  Description of Artificial Sequence: Synthetic primer
taggaacacggaggacatcaa

SEQ ID NO: 2369 - DNA, 22 bp, Artificial Sequence
  Description of Artificial Sequence: Synthetic primer
tctgacctatacccacccacaa

SEQ ID NO: 2370 - DNA, 53 bp, Artificial Sequence
  Description of Artificial Sequence: Synthetic primer
  Description of Combined DNA/RNA Molecule: Synthetic primer
tctgacctatacccacccacaacagtttctgagatgctgggtgaagatgaccc

SEQ ID NO: 2371 - DNA, 40 bp, Artificial Sequence
  Description of Artificial Sequence: Synthetic primer
  Description of Combined DNA/RNA Molecule: Synthetic primer
acgacgacgacgaaggcttggagggcacctacacagggct

SEQ ID NO: 2372 - DNA, 38 bp, Artificial Sequence
  Description of Artificial Sequence: Synthetic primer
  Description of Combined DNA/RNA Molecule: Synthetic primer
acgacgacgacgaagcaaggcttggagggcaccuacat

SEQ ID NO: 2373 - DNA, 51 bp, Artificial Sequence
  Description of Artificial Sequence: Synthetic primer
  Description of Combined DNA/RNA Molecule: Synthetic primer
acgacgacgacttgacgaacataatgggtgatgctgctcaggagccaacaa

SEQ ID NO: 2374 - DNA, 43 bp, Artificial Sequence
  Description of Artificial Sequence: Synthetic oligonucleotide
  Description of Combined DNA/RNA Molecule: Synthetic oligonucleotide
tctcataaacactccggccacccccatggcccactacacccct

SEQ ID NO: 2375 - DNA, 49 bp, Artificial Sequence
  Description of Artificial Sequence: Synthetic oligonucleotide
ccctctccaccagttgaggagagaagctcgtggctcaataacgggcaga

SEQ ID NO: 2376 - DNA, 27 bp, Artificial Sequence
  Description of Artificial Sequence: Synthetic probe
ttcactacaccctctccaccagttggg

SEQ ID NO: 2377 - DNA, 21 bp, Artificial Sequence
  Description of Artificial Sequence: Synthetic primer
tctcataaacactccggccac

SEQ ID NO: 2378 - DNA, 20 bp, Artificial Sequence
  Description of Artificial Sequence: Synthetic primer
tctgcccgttattgagccac

SEQ ID NO: 2379 - DNA, 48 bp, Artificial Sequence
  Description of Artificial Sequence: Synthetic primer
  Description of Combined DNA/RNA Molecule: Synthetic primer
tctgcccgttattgagccaccaggagccaacaggtatctggttgctct

SEQ ID NO: 2380 - DNA, 36 bp, Artificial Sequence
  Description of Artificial Sequence: Synthetic primer
  Description of Combined DNA/RNA Molecule: Synthetic primer
acgacgacgacgaaccaggccccaggtggcacacct

SEQ ID NO: 2381 - DNA, 36 bp, Artificial Sequence
  Description of Artificial Sequence: Synthetic primer
  Description of Combined DNA/RNA Molecule: Synthetic primer
acgacgacgacgaagccccaggtggcacacccaccc

SEQ ID NO: 2382 - DNA, 54 bp, Artificial Sequence
  Description of Artificial Sequence: Synthetic primer
  Description of Combined DNA/RNA Molecule: Synthetic primer
acgacgacgacttgacgaacataatcctttgctttccaacacctgccaaggaag

SEQ ID NO: 2383 - DNA, 41 bp, Artificial Sequence
  Description of Artificial Sequence: Synthetic oligonucleotide
  Description of Combined DNA/RNA Molecule: Synthetic oligonucleotide
ttgattgggatcgttcgcaccccaggaggccccgcagccgg

SEQ ID NO: 2384 - DNA, 53 bp, Artificial Sequence
  Description of Artificial Sequence: Synthetic oligonucleotide
gccaaccttttccagccaaagaaggctagtcacgtggctcaataacgggcaga

SEQ ID NO: 2385 - DNA, 24 bp, Artificial Sequence
  Description of Artificial Sequence: Synthetic probe
ttccccgcagccaaccttttccag

SEQ ID NO: 2386 - DNA, 20 bp, Artificial Sequence
  Description of Artificial Sequence: Synthetic primer
ttgattgggatcgttcgcac

SEQ ID NO: 2387 - DNA, 20 bp, Artificial Sequence
  Description of Artificial Sequence: Synthetic primer
tctgcccgttattgagccac

SEQ ID NO: 2388 - DNA, 52 bp, Artificial Sequence
  Description of Artificial Sequence: Synthetic primer
  Description of Combined DNA/RNA Molecule: Synthetic primer
tctgcccgttattgagccacgccaaggaaaggtgactagccttctctggcta

SEQ ID NO: 2389 - DNA, 36 bp, Artificial Sequence
  Description of Artificial Sequence: Synthetic primer
  Description of Combined DNA/RNA Molecule: Synthetic primer
acgacgacgacgaactgcaacctgccccccagcact

SEQ ID NO: 2390 - DNA, 40 bp, Artificial Sequence
  Description of Artificial Sequence: Synthetic primer
  Description of Combined DNA/RNA Molecule: Synthetic primer
acgacgacgacgaacacaccctgctgcactgcaacctgct

SEQ ID NO: 2391 - DNA, 51 bp, Artificial Sequence
  Description of Artificial Sequence: Synthetic primer
  Description of Combined DNA/RNA Molecule: Synthetic primer
acgacgacgacttgacgaacataatgtggctgctcagtggaaggccagcaa

SEQ ID NO: 2392 - DNA, 47 bp, Artificial Sequence
  Description of Artificial Sequence: Synthetic oligonucleotide
  Description of Combined DNA/RNA Molecule: Synthetic oligonucleotide
tctgcccaaaatactgcacaacccagcacatggtggtcttcaccata

SEQ ID NO: 2393 - DNA, 52 bp, Artificial Sequence
  Description of Artificial Sequence: Synthetic oligonucleotide
ccatgctggcactcctggttctcatcaacatttgaaactgaggcggtgttca

SEQ ID NO: 2394 - DNA, 27 bp, Artificial Sequence
  Description of Artificial Sequence: Synthetic probe
aagtcttcaccatgctggcactcctgg

SEQ ID NO: 2395 - DNA, 21 bp, Artificial Sequence
  Description of Artificial Sequence: Synthetic primer
tctgcccaaaatactgcacaa

SEQ ID NO: 2396 - DNA, 21 bp, Artificial Sequence
  Description of Artificial Sequence: Synthetic primer
tgaacaccgcctcagtttcaa

SEQ ID NO: 2397 - DNA, 53 bp, Artificial Sequence
  Description of Artificial Sequence: Synthetic primer
  Description of Combined DNA/RNA Molecule: Synthetic primer
tgaacaccgcctcagtttcaagaaggccagcaggaagatcagtatggtgttgg

SEQ ID NO: 2398 - DNA, 40 bp, Artificial Sequence
  Description of Artificial Sequence: Synthetic primer
  Description of Combined DNA/RNA Molecule: Synthetic primer
acgacgacgacgaagctccacaaagctccccaccacctcc

SEQ ID NO: 2399 - DNA, 39 bp, Artificial Sequence
  Description of Artificial Sequence: Synthetic primer
  Description of Combined DNA/RNA Molecule: Synthetic primer
acgacgacgacgaaccacaaagctccccaccaccuctcc

SEQ ID NO: 2400 - DNA, 50 bp, Artificial Sequence
  Description of Artificial Sequence: Synthetic primer
  Description of Combined DNA/RNA Molecule: Synthetic primer
acgacgacgacttgacgaacataatgagggctggagagggtggtcugggt

SEQ ID NO: 2401 - DNA, 49 bp, Artificial Sequence
  Description of Artificial Sequence: Synthetic oligonucleotide
  Description of Combined DNA/RNA Molecule: Synthetic oligonucleotide
tatggactgtaccagcccaactctcagtctcagcagagacctcagtgca

SEQ ID NO: 2402 - DNA, 59 bp, Artificial Sequence
  Description of Artificial Sequence: Synthetic oligonucleotide
gtgtgtccccaggaggagagtatttactaaccagaaccttgaaactgaggcggtgttca

SEQ ID NO: 2403 - DNA, 27 bp, Artificial Sequence
  Description of Artificial Sequence: Synthetic probe
ttgacctcagtgtgtccccaggaggag

SEQ ID NO: 2404 - DNA, 20 bp, Artificial Sequence
  Description of Artificial Sequence: Synthetic primer
tatggactgtaccagcccaa

SEQ ID NO: 2405 - DNA, 21 bp, Artificial Sequence
  Description of Artificial Sequence: Synthetic primer
tgaacaccgcctcagtttcaa

SEQ ID NO: 2406 - DNA, 45 bp, Artificial Sequence
  Description of Artificial Sequence: Synthetic primer
  Description of Combined DNA/RNA Molecule: Synthetic primer
tgaacaccgcctcagtttcaagagggtggtctgggcagttgggaa

SEQ ID NO: 2407 - DNA, 42 bp, Artificial Sequence
  Description of Artificial Sequence: Synthetic primer
  Description of Combined DNA/RNA Molecule: Synthetic primer
acgacgacgacgaaccctcccagaaccttttgctccaagcct

SEQ ID NO: 2408 - DNA, 43 bp, Artificial Sequence
  Description of Artificial Sequence: Synthetic primer
  Description of Combined DNA/RNA Molecule: Synthetic primer
acgacgacgacgaactcccagaaccttttgctccaagccccct

SEQ ID NO: 2409 - DNA, 53 bp, Artificial Sequence
  Description of Artificial Sequence: Synthetic primer
  Description of Combined DNA/RNA Molecule: Synthetic primer
acgacgacgacttgacgaacataatgggtgtctttctggcttggtggaucagc

SEQ ID NO: 2410 - DNA, 46 bp, Artificial Sequence
  Description of Artificial Sequence: Synthetic oligonucleotide
  Description of Combined DNA/RNA Molecule: Synthetic oligonucleotide
tttgcctcttgtaggtgccacccaccagcaccacaatctcaucatc

SEQ ID NO: 2411 - DNA, 54 bp, Artificial Sequence
  Description of Artificial Sequence: Synthetic oligonucleotide
tcactgtattgtcctcctcagcaccaagcaatctgtgggcaacgcggatattca

SEQ ID NO: 2412 - DNA, 34 bp, Artificial Sequence
  Description of Artificial Sequence: Synthetic probe
ttaatctcatcactgtattgtcctcctcagcacc

SEQ ID NO: 2413 - DNA, 20 bp, Artificial Sequence
  Description of Artificial Sequence: Synthetic primer
tttgcctcttgtaggtgcca

SEQ ID NO: 2414 - DNA, 19 bp, Artificial Sequence
  Description of Artificial Sequence: Synthetic primer
tgaatatccgcgttgccca

SEQ ID NO: 2415 - DNA, 51 bp, Artificial Sequence
  Description of Artificial Sequence: Synthetic primer
  Description of Combined DNA/RNA Molecule: Synthetic primer
tgaatatccgcgttgcccatgtctttctggcttggtggatcagactgctta

SEQ ID NO: 2416 - DNA, 48 bp, Artificial Sequence; identical to SEQ ID NO: 101
  Description of Artificial Sequence: Synthetic primer
  Description of Combined DNA/RNA Molecule: Synthetic primer

SEQ ID NO: 2417 - DNA, 48 bp, Artificial Sequence
  Description of Artificial Sequence: Synthetic primer
  Description of Combined DNA/RNA Molecule: Synthetic primer
acgacgacgacgaagtagctcatctcttagccatgtacacctcugcac

SEQ ID NO: 2418 - DNA, 55 bp, Artificial Sequence
  Description of Artificial Sequence: Synthetic primer
  Description of Combined DNA/RNA Molecule: Synthetic primer
acgacgacgacttgacgaacataatggtggtttctgggagtaggtgaggacttgt

SEQ ID NO: 2419 - DNA, 45 bp, Artificial Sequence
  Description of Artificial Sequence: Synthetic oligonucleotide
  Description of Combined DNA/RNA Molecule: Synthetic oligonucleotide
tgtcgcccggtagcaataaacgtcactgggagcagggtcauggaa

SEQ ID NO: 2420 - DNA, 44 bp, Artificial Sequence
  Description of Artificial Sequence: Synthetic oligonucleotide
tggaggctgcacatgcacactggtttccgcgatctttgcattca

SEQ ID NO: 2421 - DNA, 24 bp, Artificial Sequence
  Description of Artificial Sequence: Synthetic probe
ttagggtcatggaggctgcacatg

SEQ ID NO: 2422 - DNA, 21 bp, Artificial Sequence
  Description of Artificial Sequence: Synthetic primer
tgtcgcccggtagcaataaac

SEQ ID NO: 2423 - DNA, 22 bp, Artificial Sequence
  Description of Artificial Sequence: Synthetic primer
tgaatgcaaagatcgcggaaac

SEQ ID NO: 2424 - DNA, 52 bp, Artificial Sequence
  Description of Artificial Sequence: Synthetic primer
  Description of Combined DNA/RNA Molecule: Synthetic primer
tgaatgcaaagatcgcggaaacgggagtaggtgaggacttgcagtatgcata

SEQ ID NO: 2425 - DNA, 41 bp, Artificial Sequence
  Description of Artificial Sequence: Synthetic primer
  Description of Combined DNA/RNA Molecule: Synthetic primer
acgacgacgacgaaggtctttaggacccagcaggcagcagt

SEQ ID NO: 2426 - DNA, 51 bp, Artificial Sequence
  Description of Artificial Sequence: Synthetic primer
  Description of Combined DNA/RNA Molecule: Synthetic primer
acgacgacgacttgacgaacataatcctgggaagtgtggctgttgcagagg

SEQ ID NO: 2427 - DNA, 52 bp, Artificial Sequence
  Description of Artificial Sequence: Synthetic oligonucleotide
  Description of Combined DNA/RNA Molecule: Synthetic oligonucleotide
tgtgcactagtccacgtgaaaccagcaggcagcagttgtgtagaccactgga

SEQ ID NO: 2428 - DNA, 64 bp, Artificial Sequence
  Description of Artificial Sequence: Synthetic oligonucleotide
ctgagagactacaagggtccagttcagttttaattctgtctcgtttccgcgatctttgcattca

SEQ ID NO: 2429 - DNA, 32 bp, Artificial Sequence
  Description of Artificial Sequence: Synthetic probe
aatagaccactgagagactacaagggtccagt

SEQ ID NO: 2430 - DNA, 22 bp, Artificial Sequence
  Description of Artificial Sequence: Synthetic primer
tgtgcactagtccacgtgaaac

SEQ ID NO: 2431 - DNA, 22 bp, Artificial Sequence
  Description of Artificial Sequence: Synthetic primer
tgaatgcaaagatcgcggaaac

SEQ ID NO: 2432 - DNA, 41 bp, Artificial Sequence
  Description of Artificial Sequence: Synthetic primer
  Description of Combined DNA/RNA Molecule: Synthetic primer
acgacgacgacgaactgcaatactgcagtggccccacttat

SEQ ID NO: 2433 - DNA, 43 bp, Artificial Sequence
  Description of Artificial Sequence: Synthetic primer
  Description of Combined DNA/RNA Molecule: Synthetic primer
acgacgacgacgaagcaatactgcagtggccccacttacctcc

SEQ ID NO: 2434 - DNA, 52 bp, Artificial Sequence
  Description of Artificial Sequence: Synthetic primer
  Description of Combined DNA/RNA Molecule: Synthetic primer
acgacgacgacttgacgaacataattgggtttgtgccctgagtgagcagtct

SEQ ID NO: 2435 - DNA, 44 bp, Artificial Sequence
  Description of Artificial Sequence: Synthetic oligonucleotide
  Description of Combined DNA/RNA Molecule: Synthetic oligonucleotide
tacagatacggacgggaatcaaccccctgggccacaacactttc

SEQ ID NO: 2436 - DNA, 58 bp, Artificial Sequence
  Description of Artificial Sequence: Synthetic oligonucleotide
cttttcctacagattaccaggaccaacactccaggcttgtttacatcctcctgcgtca

SEQ ID NO: 2437 - DNA, 34 bp, Artificial Sequence
  Description of Artificial Sequence: Synthetic probe
ttcacaacacttttcctacagattaccaggacca

SEQ ID NO: 2438 - DNA, 22 bp, Artificial Sequence
  Description of Artificial Sequence: Synthetic primer
tacagatacggacgggaatcaa

SEQ ID NO: 2439 - DNA, 22 bp, Artificial Sequence
  Description of Artificial Sequence: Synthetic primer
tgacgcaggaggatgtaaacaa

SEQ ID NO: 2440 - DNA, 47 bp, Artificial Sequence
  Description of Artificial Sequence: Synthetic primer
  Description of Combined DNA/RNA Molecule: Synthetic primer
tgacgcaggaggatgtaaacaagagcagtcctggcctggaatgttga

SEQ ID NO: 2441 - DNA, 45 bp, Artificial Sequence
  Description of Artificial Sequence: Synthetic primer
  Description of Combined DNA/RNA Molecule: Synthetic primer
acgacgacgacgaaccaatcactccacaaactccagagcaaggcg

SEQ ID NO: 2442 - DNA, 46 bp, Artificial Sequence
  Description of Artificial Sequence: Synthetic primer
  Description of Combined DNA/RNA Molecule: Synthetic primer
acgacgacgacgaaccccatctccaatcactccacaaactccagaa

SEQ ID NO: 2443 - DNA, 52 bp, Artificial Sequence
  Description of Artificial Sequence: Synthetic primer
  Description of Combined DNA/RNA Molecule: Synthetic primer
acgacgacgacttgacgaacataatgtgaggacactgggtgtggaaaactga

SEQ ID NO: 2444 - DNA, 49 bp, Artificial Sequence
  Description of Artificial Sequence: Synthetic oligonucleotide
  Description of Combined DNA/RNA Molecule: Synthetic oligonucleotide
ttggcgcaacggtttccaagcacacacctttaaaggcaggttcacagtc

SEQ ID NO: 2445 - DNA, 48 bp, Artificial Sequence
  Description of Artificial Sequence: Synthetic oligonucleotide
cagctctcccacatcctggcacccagttgtttacatcctcctgcgtca

SEQ ID NO: 2446 - DNA, 27 bp, Artificial Sequence
  Description of Artificial Sequence: Synthetic probe
ttaggttcacagctctcccacatcctg

SEQ ID NO: 2447 - DNA, 19 bp, Artificial Sequence
  Description of Artificial Sequence: Synthetic primer
ttggcgcaacggtttccaa

SEQ ID NO: 2448 - DNA, 22 bp, Artificial Sequence
  Description of Artificial Sequence: Synthetic primer
tgacgcaggaggatgtaaacaa

SEQ ID NO: 2449 - DNA, 51 bp, Artificial Sequence
  Description of Artificial Sequence: Synthetic primer
  Description of Combined DNA/RNA Molecule: Synthetic primer
tgacgcaggaggatgtaaacaagacactgggtgtggaaaactggatgccaa

SEQ ID NO: 2450 - DNA, 41 bp, Artificial Sequence
  Description of Artificial Sequence: Synthetic primer
  Description of Combined DNA/RNA Molecule: Synthetic primer
acgacgacgacgaactgagctacagctcccacagcacacct

SEQ ID NO: 2451 - DNA, 41 bp, Artificial Sequence
  Description of Artificial Sequence: Synthetic primer
  Description of Combined DNA/RNA Molecule: Synthetic primer
acgacgacgacgaactggctgagctacagctcccacagcat

SEQ ID NO: 2452 - DNA, 57 bp, Artificial Sequence
  Description of Artificial Sequence: Synthetic primer
  Description of Combined DNA/RNA Molecule: Synthetic primer
acgacgacgacttgacgaacataatagtgtttgaagctgtttggagggaacagtggc

SEQ ID NO: 2453 - DNA, 48 bp, Artificial Sequence
  Description of Artificial Sequence: Synthetic oligonucleotide
  Description of Combined DNA/RNA Molecule: Synthetic oligonucleotide
ttcagcagcctggcatcacacccaggagtgcaccagagatccagaagt

SEQ ID NO: 2454 - DNA, 53 bp, Artificial Sequence
  Description of Artificial Sequence: Synthetic oligonucleotide
gaaacccacagagacttctcaagtcagcaggaacgtggagcgctaaggttgca

SEQ ID NO: 2455 - DNA, 34 bp, Artificial Sequence
  Description of Artificial Sequence: Synthetic probe
ttagatccagaaacccacagagacttctcaagtc

SEQ ID NO: 2456 - DNA, 19 bp, Artificial Sequence
  Description of Artificial Sequence: Synthetic primer
ttcagcagcctggcatcac

SEQ ID NO: 2457 - DNA, 19 bp, Artificial Sequence
  Description of Artificial Sequence: Synthetic primer
tgcaaccttagcgctccac

SEQ ID NO: 2458 - DNA, 50 bp, Artificial Sequence
  Description of Artificial Sequence: Synthetic primer
  Description of Combined DNA/RNA Molecule: Synthetic primer
tgcaaccttagcgctccacgtttgaagctgtttggagggaacaatggttc

SEQ ID NO: 2459 - DNA, 42 bp, Artificial Sequence
  Description of Artificial Sequence: Synthetic primer
  Description of Combined DNA/RNA Molecule: Synthetic primer
acgacgacgacgaacttaaaacatggcaccccaggcagggaa

SEQ ID NO: 2460 - DNA, 44 bp, Artificial Sequence
  Description of Artificial Sequence: Synthetic primer
  Description of Combined DNA/RNA Molecule: Synthetic primer
acgacgacgacgaaagaggcaacttaaaacatggcaccccaggt

SEQ ID NO: 2461 - DNA, 47 bp, Artificial Sequence
  Description of Artificial Sequence: Synthetic primer
  Description of Combined DNA/RNA Molecule: Synthetic primer
acgacgacgacttgacgaacataatgcctctggcctggaggcctcct

SEQ ID NO: 2462 - DNA, 53 bp, Artificial Sequence
  Description of Artificial Sequence: Synthetic oligonucleotide
  Description of Combined DNA/RNA Molecule: Synthetic oligonucleotide
ttgttcgcccgttggtcacgatttgtgcaaattggcagagaagggccacagaa

SEQ ID NO: 2463 - DNA, 44 bp, Artificial Sequence
  Description of Artificial Sequence: Synthetic oligonucleotide
cagggaccaagtcaccccttcagccgtggagcgctaaggttgca

SEQ ID NO: 2464 - DNA, 24 bp, Artificial Sequence
  Description of Artificial Sequence: Synthetic probe
ttagggccacagggaccaagtcac

SEQ ID NO: 2465 - DNA, 19 bp, Artificial Sequence
  Description of Artificial Sequence: Synthetic primer
ttgttcgcccgttggtcac

SEQ ID NO: 2466 - DNA, 19 bp, Artificial Sequence
  Description of Artificial Sequence: Synthetic primer
tgcaaccttagcgctccac

SEQ ID NO: 2467 - DNA, 43 bp, Artificial Sequence
  Description of Artificial Sequence: Synthetic primer
  Description of Combined DNA/RNA Molecule: Synthetic primer
tgcaaccttagcgctccacctccctgggatccctggttgaaga

SEQ ID NO: 2468 - DNA, 39 bp, Artificial Sequence
  Description of Artificial Sequence: Synthetic primer
  Description of Combined DNA/RNA Molecule: Synthetic primer
acgacgacgacgaagcctcaccacctctccagcagggag

SEQ ID NO: 2469 - DNA, 38 bp, Artificial Sequence
  Description of Artificial Sequence: Synthetic primer
  Description of Combined DNA/RNA Molecule: Synthetic primer
acgacgacgacgaagggccagcctcaccacctcuccaa

SEQ ID NO: 2470 - DNA, 52 bp, Artificial Sequence
  Description of Artificial Sequence: Synthetic primer
  Description of Combined DNA/RNA Molecule: Synthetic primer
acgacgacgacttgacgaacataatgctggtgcatgcctaggtgtgagggta

SEQ ID NO: 2471 - DNA, 46 bp, Artificial Sequence
  Description of Artificial Sequence: Synthetic oligonucleotide
  Description of Combined DNA/RNA Molecule: Synthetic oligonucleotide
tatcgcatcaaatggagagcaacttccccagcccccattcacacga

SEQ ID NO: 2472 - DNA, 48 bp, Artificial Sequence
  Description of Artificial Sequence: Synthetic oligonucleotide
cacagatccctagcaccccaagccccttgaccgctgttatacgttgca

SEQ ID NO: 2473 - DNA, 28 bp, Artificial Sequence
  Description of Artificial Sequence: Synthetic probe
ttccattcacacagatccctagcacccc

SEQ ID NO: 2474 - DNA, 22 bp, Artificial Sequence
  Description of Artificial Sequence: Synthetic primer
tatcgcatcaaatggagagcaa

SEQ ID NO: 2475 - DNA, 22 bp, Artificial Sequence
  Description of Artificial Sequence: Synthetic primer
tgcaacgtataacagcggtcaa

SEQ ID NO: 2476 - DNA, 50 bp, Artificial Sequence
  Description of Artificial Sequence: Synthetic primer
  Description of Combined DNA/RNA Molecule: Synthetic primer
tgcaacgtataacagcggtcaagtgcatgcctaggtgtgaaggatgggag

SEQ ID NO: 2477 - DNA, 37 bp, Artificial Sequence
  Description of Artificial Sequence: Synthetic primer
  Description of Combined DNA/RNA Molecule: Synthetic primer
acgacgacgacgaaagccaccacctccagccaccccg

SEQ ID NO: 2478 - DNA, 38 bp, Artificial Sequence
  Description of Artificial Sequence: Synthetic primer
  Description of Combined DNA/RNA Molecule: Synthetic primer
acgacgacgacgaacaactccccagccaccaccuccag

SEQ ID NO: 2479 - DNA, 54 bp, Artificial Sequence
  Description of Artificial Sequence: Synthetic primer
  Description of Combined DNA/RNA Molecule: Synthetic primer
acgacgacgacttgacgaacataatgtgttgccagggactcttgtgctagggtt

SEQ ID NO: 2480 - DNA, 52 bp, Artificial Sequence
  Description of Artificial Sequence: Synthetic oligonucleotide
  Description of Combined DNA/RNA Molecule: Synthetic oligonucleotide
tcctagtacctacagtgggcaacagggattccaccaccaaacacgcacattt

SEQ ID NO: 2481 - DNA, 45 bp, Artificial Sequence
  Description of Artificial Sequence: Synthetic oligonucleotide
catcccaggtgggcacccacctcttgaccgctgttatacgttgca

SEQ ID NO: 2482 - DNA, 22 bp, Artificial Sequence
  Description of Artificial Sequence: Synthetic probe
ttacacgcacatcccaggtggg

SEQ ID NO: 2483 - DNA, 22 bp, Artificial Sequence
  Description of Artificial Sequence: Synthetic primer
tcctagtacctacagtgggcaa

SEQ ID NO: 2484 - DNA, 22 bp, Artificial Sequence
  Description of Artificial Sequence: Synthetic primer
tgcaacgtataacagcggtcaa

SEQ ID NO: 2485 - DNA, 53 bp, Artificial Sequence
  Description of Artificial Sequence: Synthetic primer
  Description of Combined DNA/RNA Molecule: Synthetic primer
tgcaacgtataacagcggtcaaggtcagactcaaagatggactgagatgggta

SEQ ID NO: 2486 - DNA, 42 bp, Artificial Sequence
  Description of Artificial Sequence: Synthetic primer
  Description of Combined DNA/RNA Molecule: Synthetic primer
acgacgacgacgaacccaaaccccacaaaactgctcacagcg

SEQ ID NO: 2487 - DNA, 43 bp, Artificial Sequence
  Description of Artificial Sequence: Synthetic primer
  Description of Combined DNA/RNA Molecule: Synthetic primer
acgacgacgacgaaccaaaccccacaaaactgctcacagcaat

SEQ ID NO: 2488 - DNA, 50 bp, Artificial Sequence
  Description of Artificial Sequence: Synthetic primer
  Description of Combined DNA/RNA Molecule: Synthetic primer
acgacgacgacttgacgaacataatgagccaggcagtggagtgcauagaa

SEQ ID NO: 2489 - DNA, 56 bp, Artificial Sequence
  Description of Artificial Sequence: Synthetic oligonucleotide
  Description of Combined DNA/RNA Molecule: Synthetic oligonucleotide
tagtttgtcgaaagtcccacacgcaacacagatgatctaccaaattcctcacaagc

SEQ ID NO: 2490 - DNA, 62 bp, Artificial Sequence
  Description of Artificial Sequence: Synthetic oligonucleotide
caaattcagaggattaagttgtcagtcagcacattgctaccgtgcaaaattcaggctgtgca

SEQ ID NO: 2491 - DNA, 39 bp, Artificial Sequence
  Description of Artificial Sequence: Synthetic probe
ttttcctcacaaattcagaggattaagttgtcagtcagc

SEQ ID NO: 2492 - DNA, 22 bp, Artificial Sequence
  Description of Artificial Sequence: Synthetic primer
tagtttgtcgaaagtcccacac

SEQ ID NO: 2493 - DNA, 21 bp, Artificial Sequence
  Description of Artificial Sequence: Synthetic primer
tgcacagcctgaattttgcac

SEQ ID NO: 2494 - DNA, 52 bp, Artificial Sequence
  Description of Artificial Sequence: Synthetic primer
  Description of Combined DNA/RNA Molecule: Synthetic primer
tgcacagcctgaattttgcacgagtgcatagagaggaaggtagcagtgtgcc

SEQ ID NO: 2495 - DNA, 42 bp, Artificial Sequence; identical to SEQ ID NO: 2022
  Description of Artificial Sequence: Synthetic primer
  Description of Combined DNA/RNA Molecule: Synthetic primer

SEQ ID NO: 2496 - DNA, 42 bp, Artificial Sequence
  Description of Artificial Sequence: Synthetic primer
  Description of Combined DNA/RNA Molecule: Synthetic primer
acgacgacgacgaacagcccagaaactgggcatttccugcta

SEQ ID NO: 2497 - DNA, 60 bp, Artificial Sequence
  Description of Artificial Sequence: Synthetic primer
  Description of Combined DNA/RNA Molecule: Synthetic primer
acgacgacgacttgacgaacataatgaaagctgacctgatctctagaactcagccutcat

SEQ ID NO: 2498 - DNA, 52 bp, Artificial Sequence
  Description of Artificial Sequence: Synthetic oligonucleotide
  Description of Combined DNA/RNA Molecule: Synthetic oligonucleotide
tagacacgagcgaggtcaccaagacttctggcatcaccatcatggcauatcc

SEQ ID NO: 2499 - DNA, 58 bp, Artificial Sequence
  Description of Artificial Sequence: Synthetic oligonucleotide
tatttttcctatgcccagtccatgcattctggttgtggtgcaaaattcaggctgtgca

SEQ ID NO: 2500 - DNA, 32 bp, Artificial Sequence
  Description of Artificial Sequence: Synthetic probe
cccatggcatatttttcctatgcccagtccat

SEQ ID NO: 2501 - DNA, 19 bp, Artificial Sequence
  Description of Artificial Sequence: Synthetic primer
tagacacgagcgaggtcac

SEQ ID NO: 2502 - DNA, 21 bp, Artificial Sequence
  Description of Artificial Sequence: Synthetic primer
tgcacagcctgaattttgcac

SEQ ID NO: 2503 - DNA, 45 bp, Artificial Sequence
  Description of Artificial Sequence: Synthetic primer
  Description of Combined DNA/RNA Molecule: Synthetic primer
acgacgacgacgaacacctcatgtggagggcaaagttgcaccaga

SEQ ID NO: 2504 - DNA, 45 bp, Artificial Sequence
  Description of Artificial Sequence: Synthetic primer
  Description of Combined DNA/RNA Molecule: Synthetic primer
acgacgacgacgaaggactgaactagccatgatcacctcaugtga

SEQ ID NO: 2505 - DNA, 56 bp, Artificial Sequence
  Description of Artificial Sequence: Synthetic primer
  Description of Combined DNA/RNA Molecule: Synthetic primer
acgacgacgacttgacgaacataatctttgtgtgggagacttggagatgccctccc

SEQ ID NO: 2506 - DNA, 47 bp, Artificial Sequence
  Description of Artificial Sequence: Synthetic oligonucleotide
  Description of Combined DNA/RNA Molecule: Synthetic oligonucleotide
ttcttcacagtaccgccacaccagggaacttgtgagcctacagtggg

SEQ ID NO: 2507 - DNA, 49 bp, Artificial Sequence
  Description of Artificial Sequence: Synthetic oligonucleotide
gtgaaaggtaaccagcccccactcaaggtgtgtgttgtctggtggtgca

SEQ ID NO: 2508 - DNA, 28 bp, Artificial Sequence
  Description of Artificial Sequence: Synthetic probe
ttgcctacagtgaaaggtaaccagcccc

SEQ ID NO: 2509 - DNA, 20 bp, Artificial Sequence
  Description of Artificial Sequence: Synthetic primer
ttcttcacagtaccgccaca

SEQ ID NO: 2510 - DNA, 19 bp, Artificial Sequence
  Description of Artificial Sequence: Synthetic primer
tgcaccaccagacaacaca

SEQ ID NO: 2511 - DNA, 45 bp, Artificial Sequence
  Description of Artificial Sequence: Synthetic primer
  Description of Combined DNA/RNA Molecule: Synthetic primer
tgcaccaccagacaacacagagatgccctcctggcaccctgagta

SEQ ID NO: 2512 - DNA, 46 bp, Artificial Sequence
  Description of Artificial Sequence: Synthetic primer
  Description of Combined DNA/RNA Molecule: Synthetic primer
acgacgacgacgaagcaggacagttctgcagaaagtttccacccct

SEQ ID NO: 2513 - DNA, 45 bp, Artificial Sequence
  Description of Artificial Sequence: Synthetic primer
  Description of Combined DNA/RNA Molecule: Synthetic primer
acgacgacgacgaagacagttctgcagaaagtttccacccccaaa

SEQ ID NO: 2514 - DNA, 57 bp, Artificial Sequence
  Description of Artificial Sequence: Synthetic primer
  Description of Combined DNA/RNA Molecule: Synthetic primer
acgacgacgacttgacgaacataattgaggtagttgtgggagaaaccattgcutgaa

SEQ ID NO: 2515 - DNA, 42 bp, Artificial Sequence
  Description of Artificial Sequence: Synthetic oligonucleotide
  Description of Combined DNA/RNA Molecule: Synthetic oligonucleotide
taccctcctagctccgtacaccccagccctgcactcagacca

SEQ ID NO: 2516 - DNA, 43 bp, Artificial Sequence
  Description of Artificial Sequence: Synthetic oligonucleotide
gactgaagcagcagcccccacctctgtgttgtctggtggtgca

SEQ ID NO: 2517 - DNA, 26 bp, Artificial Sequence
  Description of Artificial Sequence: Synthetic probe
aagcactcagactgaagcagcagccc

SEQ ID NO: 2518 - DNA, 20 bp, Artificial Sequence
  Description of Artificial Sequence: Synthetic primer
taccctcctagctccgtaca

SEQ ID NO: 2519 - DNA, 19 bp, Artificial Sequence
  Description of Artificial Sequence: Synthetic primer
tgcaccaccagacaacaca

SEQ ID NO: 2520 - DNA, 50 bp, Artificial Sequence
  Description of Artificial Sequence: Synthetic primer
  Description of Combined DNA/RNA Molecule: Synthetic primer
tgcaccaccagacaacacaggtagttgtgggagaaaccattgcctgaggg

SEQ ID NO: 2521 - DNA, 39 bp, Artificial Sequence
  Description of Artificial Sequence: Synthetic primer
  Description of Combined DNA/RNA Molecule: Synthetic primer
acgacgacgacgaacagagaggcacaggacaccaatggt

SEQ ID NO: 2522 - DNA, 39 bp, Artificial Sequence
  Description of Artificial Sequence: Synthetic primer
  Description of Combined DNA/RNA Molecule: Synthetic primer
acgacgacgacgaacagggccatgccagagcagagggac

SEQ ID NO: 2523 - DNA, 52 bp, Artificial Sequence
  Description of Artificial Sequence: Synthetic primer
  Description of Combined DNA/RNA Molecule: Synthetic primer
acgacgacgacttgacgaacataattgcatgtcagaggctgccttgcaggga

SEQ ID NO: 2524 - DNA, 47 bp, Artificial Sequence
  Description of Artificial Sequence: Synthetic oligonucleotide
  Description of Combined DNA/RNA Molecule: Synthetic oligonucleotide
tcatcgccctcagatcttccaggcaacagcctctcctgttcaucctg

SEQ ID NO: 2525 - DNA, 47 bp, Artificial Sequence
  Description of Artificial Sequence: Synthetic oligonucleotide
tcccagcccagacacttcttgccacttggaggatagattggagggca

SEQ ID NO: 2526 - DNA, 30 bp, Artificial Sequence
  Description of Artificial Sequence: Synthetic probe
aactgttcatcccagcccagacacttcttg

SEQ ID NO: 2527 - DNA, 21 bp, Artificial Sequence
  Description of Artificial Sequence: Synthetic primer
tcatcgccctcagatcttcca

SEQ ID NO: 2528 - DNA, 21 bp, Artificial Sequence
  Description of Artificial Sequence: Synthetic primer
tgccctccaatctatcctcca

SEQ ID NO: 2529 - DNA, 44 bp, Artificial Sequence
  Description of Artificial Sequence: Synthetic primer
  Description of Combined DNA/RNA Molecule: Synthetic primer
tgccctccaatctatcctccagcagaggctgtgtgcaatggcag

SEQ ID NO: 2530 - DNA, 38 bp, Artificial Sequence
  Description of Artificial Sequence: Synthetic primer
  Description of Combined DNA/RNA Molecule: Synthetic primer
acgacgacgacgaaagcagcagccacagcaccaggctt

SEQ ID NO: 2531 - DNA, 37 bp, Artificial Sequence
  Description of Artificial Sequence: Synthetic primer
  Description of Combined DNA/RNA Molecule: Synthetic primer
acgacgacgacgaagccacagcaccaggctccacagt

SEQ ID NO: 2532 - DNA, 50 bp, Artificial Sequence
  Description of Artificial Sequence: Synthetic primer
  Description of Combined DNA/RNA Molecule: Synthetic primer
acgacgacgacttgacgaacataatggccactgtgcccagtgagcugatt

SEQ ID NO: 2533 - DNA, 49 bp, Artificial Sequence
  Description of Artificial Sequence: Synthetic oligonucleotide
  Description of Combined DNA/RNA Molecule: Synthetic oligonucleotide
taaccagttaccaccgccagtggaactcacagaggaagccaccagcccc

SEQ ID NO: 2534 - DNA, 49 bp, Artificial Sequence
  Description of Artificial Sequence: Synthetic oligonucleotide
gccttcacttcacactgctgctcctccctggaggatagattggagggca

SEQ ID NO: 2535 - DNA, 27 bp, Artificial Sequence
  Description of Artificial Sequence: Synthetic probe
ttgccaccagccttcacttcacactgc

SEQ ID NO: 2536 - DNA, 19 bp, Artificial Sequence
  Description of Artificial Sequence: Synthetic primer
taaccagttaccaccgcca

SEQ ID NO: 2537 - DNA, 21 bp, Artificial Sequence
  Description of Artificial Sequence: Synthetic primer
tgccctccaatctatcctcca

SEQ ID NO: 2538 - DNA, 46 bp, Artificial Sequence
  Description of Artificial Sequence: Synthetic primer
  Description of Combined DNA/RNA Molecule: Synthetic primer
tgccctccaatctatcctccagccactgtgcccagtgagttgatcc

SEQ ID NO: 2539 - DNA, 39 bp, Artificial Sequence
  Description of Artificial Sequence: Synthetic primer
  Description of Combined DNA/RNA Molecule: Synthetic primer
acgacgacgacgaaagagctgagaggcccctccaucctc

SEQ ID NO: 2540 - DNA, 39 bp, Artificial Sequence
  Description of Artificial Sequence: Synthetic primer
  Description of Combined DNA/RNA Molecule: Synthetic primer
acgacgacgacgaagcagccagagctgagaggcccctct

SEQ ID NO: 2541 - DNA, 48 bp, Artificial Sequence
  Description of Artificial Sequence: Synthetic primer
  Description of Combined DNA/RNA Molecule: Synthetic primer
acgacgacgacttgacgaacataatggtgagaggcagggtgccuggct

SEQ ID NO: 2542 - DNA, 46 bp, Artificial Sequence
  Description of Artificial Sequence: Synthetic oligonucleotide
  Description of Combined DNA/RNA Molecule: Synthetic oligonucleotide
tcgcaccggaattctgaccaacctgaggctgcagagaatcagggtc

SEQ ID NO: 2543 - DNA, 48 bp, Artificial Sequence
  Description of Artificial Sequence: Synthetic oligonucleotide
gggctgtctgtcttctcactttgggagcggtagtttcccatgacggca

SEQ ID NO: 2544 - DNA, 33 bp, Artificial Sequence
  Description of Artificial Sequence: Synthetic probe
ttagaatcagggctgtctgtcttctcactttgg

SEQ ID NO: 2545 - DNA, 19 bp, Artificial Sequence
  Description of Artificial Sequence: Synthetic primer
tcgcaccggaattctgacc

SEQ ID NO: 2546 - DNA, 20 bp, Artificial Sequence
  Description of Artificial Sequence: Synthetic primer
tgccgtcatgggaaactacc

SEQ ID NO: 2547 - DNA, 43 bp, Artificial Sequence
  Description of Artificial Sequence: Synthetic primer
  Description of Combined DNA/RNA Molecule: Synthetic primer
tgccgtcatgggaaactaccgtgagaggcagggtgcttggcct

SEQ ID NO: 2548 - DNA, 39 bp, Artificial Sequence
  Description of Artificial Sequence: Synthetic primer
  Description of Combined DNA/RNA Molecule: Synthetic primer
acgacgacgacgaacagggtgcctaggagccacaggcta

SEQ ID NO: 2549 - DNA, 38 bp, Artificial Sequence
  Description of Artificial Sequence: Synthetic primer
  Description of Combined DNA/RNA Molecule: Synthetic primer
acgacgacgacgaacccagcaacacagggtgccuaggg

SEQ ID NO: 2550 - DNA, 51 bp, Artificial Sequence
  Description of Artificial Sequence: Synthetic primer
  Description of Combined DNA/RNA Molecule: Synthetic primer
acgacgacgacttgacgaacataattgatgtgtgcttgccctgtgcutgcc

SEQ ID NO: 2551 - DNA, 42 bp, Artificial Sequence
  Description of Artificial Sequence: Synthetic oligonucleotide
  Description of Combined DNA/RNA Molecule: Synthetic oligonucleotide
ttgcacgttgtcctgcaccacagggaggcaggcaacagcctc

SEQ ID NO: 2552 - DNA, 44 bp, Artificial Sequence
  Description of Artificial Sequence: Synthetic oligonucleotide
gccctcacacacttctgccaccccggtagtttcccatgacggca

SEQ ID NO: 2553 - DNA, 27 bp, Artificial Sequence
  Description of Artificial Sequence: Synthetic probe
ttggcaacagccctcacacacttctgc

SEQ ID NO: 2554 - DNA, 19 bp, Artificial Sequence
  Description of Artificial Sequence: Synthetic primer
ttgcacgttgtcctgcacc

SEQ ID NO: 2555 - DNA, 20 bp, Artificial Sequence
  Description of Artificial Sequence: Synthetic primer
tgccgtcatgggaaactacc

SEQ ID NO: 2556 - DNA, 44 bp, Artificial Sequence
  Description of Artificial Sequence: Synthetic primer
  Description of Combined DNA/RNA Molecule: Synthetic primer
tgccgtcatgggaaactaccgtgtgctggctctgggagtggcaa

SEQ ID NO: 2557 - DNA, 43 bp, Artificial Sequence
  Description of Artificial Sequence: Synthetic primer
  Description of Combined DNA/RNA Molecule: Synthetic primer
acgacgacgacgaacagcaaggtacaagggaccagacauctgt

SEQ ID NO: 2558 - DNA, 44 bp, Artificial Sequence
  Description of Artificial Sequence: Synthetic primer
  Description of Combined DNA/RNA Molecule: Synthetic primer
acgacgacgacgaaagcaaggtacaagggaccagacatcugccc

SEQ ID NO: 2559 - DNA, 51 bp, Artificial Sequence
  Description of Artificial Sequence: Synthetic primer
  Description of Combined DNA/RNA Molecule: Synthetic primer
acgacgacgacttgacgaacataatgctccctcttgccatggtgcaggtgt

SEQ ID NO: 2560 - DNA, 44 bp, Artificial Sequence
  Description of Artificial Sequence: Synthetic oligonucleotide
  Description of Combined DNA/RNA Molecule: Synthetic oligonucleotide
tgcttacccacgatgcaccgcctcctcagcagcacaacacacgg

SEQ ID NO: 2561 - DNA, 49 bp, Artificial Sequence
  Description of Artificial Sequence: Synthetic oligonucleotide
cacaagcttcctgtcatcccagcacccacggtcgtatgacttgctcgca

SEQ ID NO: 2562 - DNA, 31 bp, Artificial Sequence
  Description of Artificial Sequence: Synthetic probe
ttcacaacacacaagcttcctgtcatcccag

SEQ ID NO: 2563 - DNA, 19 bp, Artificial Sequence
  Description of Artificial Sequence: Synthetic primer
tgcttacccacgatgcacc

SEQ ID NO: 2564 - DNA, 20 bp, Artificial Sequence
  Description of Artificial Sequence: Synthetic primer
tgcgagcaagtcatacgacc

SEQ ID NO: 2565 - DNA, 46 bp, Artificial Sequence
  Description of Artificial Sequence: Synthetic primer
  Description of Combined DNA/RNA Molecule: Synthetic primer
tgcgagcaagtcatacgaccgtgcaggtgctgattgtggatgctga

SEQ ID NO: 2566 - DNA, 37 bp, Artificial Sequence
  Description of Artificial Sequence: Synthetic primer
  Description of Combined DNA/RNA Molecule: Synthetic primer
acgacgacgacgaaagcaaacctgaggctgcagagag

SEQ ID NO: 2567 - DNA, 55 bp, Artificial Sequence
  Description of Artificial Sequence: Synthetic primer
  Description of Combined DNA/RNA Molecule: Synthetic primer
acgacgacgacttgacgaacataatcatttccaggcttttctgggtgaggggcaa

SEQ ID NO: 2568 - DNA, 50 bp, Artificial Sequence
  Description of Artificial Sequence: Synthetic oligonucleotide
  Description of Combined DNA/RNA Molecule: Synthetic oligonucleotide
tagccgatggcgtaaaaccgagaaccagggctgtctgtcttcccacttca

SEQ ID NO: 2569 - DNA, 41 bp, Artificial Sequence
  Description of Artificial Sequence: Synthetic oligonucleotide
ctttgggagccaggcaccctgggtcgtatgacttgctcgca

SEQ ID NO: 2570 - DNA, 23 bp, Artificial Sequence
  Description of Artificial Sequence: Synthetic probe
aacttcccactttgggagccagg

SEQ ID NO: 2571 - DNA, 19 bp, Artificial Sequence
  Description of Artificial Sequence: Synthetic primer
tagccgatggcgtaaaacc

SEQ ID NO: 2572 - DNA, 20 bp, Artificial Sequence
  Description of Artificial Sequence: Synthetic primer
tgcgagcaagtcatacgacc

SEQ ID NO: 2573 - DNA, 43 bp, Artificial Sequence
  Description of Artificial Sequence: Synthetic primer
  Description of Combined DNA/RNA Molecule: Synthetic primer
tgcgagcaagtcatacgaccctgggtgagaggcaggatgccta

SEQ ID NO: 2574 - DNA, 38 bp, Artificial Sequence
  Description of Artificial Sequence: Synthetic primer
  Description of Combined DNA/RNA Molecule: Synthetic primer
acgacgacgacgaagagcaaacctgaggctgcagagag

SEQ ID NO: 2575 - DNA, 39 bp, Artificial Sequence
  Description of Artificial Sequence: Synthetic primer
  Description of Combined DNA/RNA Molecule: Synthetic primer
acgacgacgacgaaggcccctccatccttgaggagcaag

SEQ ID NO: 2576 - DNA, 55 bp, Artificial Sequence; identical to SEQ ID NO: 2567
  Description of Artificial Sequence: Synthetic primer
  Description of Combined DNA/RNA Molecule: Synthetic primer

SEQ ID NO: 2577 - DNA, 49 bp, Artificial Sequence
  Description of Artificial Sequence: Synthetic oligonucleotide
  Description of Combined DNA/RNA Molecule: Synthetic oligonucleotide
ttacaggccgcatagcaacagaaccagggctgtctgtcttctcacttca

SEQ ID NO: 2578 - DNA, 41 bp, Artificial Sequence
  Description of Artificial Sequence: Synthetic oligonucleotide
ctttgggagccaggcaccctgcgttgagacatgggctcgca

SEQ ID NO: 2579 - DNA, 23 bp, Artificial Sequence
  Description of Artificial Sequence: Synthetic probe
aacttcccactttgggagccagg

SEQ ID NO: 2580 - DNA, 19 bp, Artificial Sequence
  Description of Artificial Sequence: Synthetic primer
ttacaggccgcatagcaac

SEQ ID NO: 2581 - DNA, 19 bp, Artificial Sequence
  Description of Artificial Sequence: Synthetic primer
tgcgagcccatgtctcaac

SEQ ID NO: 2582 - DNA, 42 bp, Artificial Sequence
  Description of Artificial Sequence: Synthetic primer
  Description of Combined DNA/RNA Molecule: Synthetic primer
tgcgagcccatgtctcaacctgggtgagaggcagggtgccta

SEQ ID NO: 2583 - DNA, 38 bp, Artificial Sequence; identical to SEQ ID NO: 2574
  Description of Artificial Sequence: Synthetic primer
  Description of Combined DNA/RNA Molecule: Synthetic primer

SEQ ID NO: 2584 - DNA, 41 bp, Artificial Sequence
  Description of Artificial Sequence: Synthetic primer
  Description of Combined DNA/RNA Molecule: Synthetic primer
acgacgacgacgaacccctccatccttgaggagcaaaccta

SEQ ID NO: 2585 - DNA, 56 bp, Artificial Sequence
  Description of Artificial Sequence: Synthetic primer
  Description of Combined DNA/RNA Molecule: Synthetic primer
acgacgacgacttgacgaacataatccatttccaggcttttctgggtgaggggcaa

SEQ ID NO: 2586 - DNA, 50 bp, Artificial Sequence
  Description of Artificial Sequence: Synthetic oligonucleotide
  Description of Combined DNA/RNA Molecule: Synthetic oligonucleotide
ttcgcctaccgcagtgaacgagaaccagggctgtctgtcttcccacttca

SEQ ID NO: 2587 - DNA, 40 bp, Artificial Sequence
  Description of Artificial Sequence: Synthetic oligonucleotide
ctttggaggccaggcaccctggttgagacatgggctcgca

SEQ ID NO: 2588 - DNA, 23 bp, Artificial Sequence
  Description of Artificial Sequence: Synthetic probe
aacttcccactttggaggccagg

SEQ ID NO: 2589 - DNA, 19 bp, Artificial Sequence
  Description of Artificial Sequence: Synthetic primer
ttcgcctaccgcagtgaac

SEQ ID NO: 2590 - DNA, 19 bp, Artificial Sequence
  Description of Artificial Sequence: Synthetic primer
tgcgagcccatgtctcaac

SEQ ID NO: 2591 - DNA, 42 bp, Artificial Sequence
  Description of Artificial Sequence: Synthetic primer
  Description of Combined DNA/RNA Molecule: Synthetic primer
tgcgagcccatgtctcaacctgggtgagaggcaggatgccta

SEQ ID NO: 2592 - DNA, 45 bp, Artificial Sequence; identical to SEQ ID NO: 2173
  Description of Artificial Sequence: Synthetic primer
  Description of Combined DNA/RNA Molecule: Synthetic primer

SEQ ID NO: 2593 - DNA, 43 bp, Artificial Sequence
  Description of Artificial Sequence: Synthetic primer
  Description of Combined DNA/RNA Molecule: Synthetic primer
acgacgacgacgaatgcagacctcccccaactctttacuatgt

SEQ ID NO: 2594 - DNA, 48 bp, Artificial Sequence
  Description of Artificial Sequence: Synthetic primer
  Description of Combined DNA/RNA Molecule: Synthetic primer
acgacgacgacttgacgaacataatggccctgcccaactgcacagccc

SEQ ID NO: 2595 - DNA, 42 bp, Artificial Sequence
  Description of Artificial Sequence: Synthetic oligonucleotide
  Description of Combined DNA/RNA Molecule: Synthetic oligonucleotide
ttcgcctaccgcagtgaacctgaggactgaggccgcaaggat

SEQ ID NO: 2596 - DNA, 44 bp, Artificial Sequence
  Description of Artificial Sequence: Synthetic oligonucleotide
agggcatacccccaaggagtacagggttgagacatgggctcgca

SEQ ID NO: 2597 - DNA, 21 bp, Artificial Sequence
  Description of Artificial Sequence: Synthetic probe
ttggccgcaagggcatacccc

SEQ ID NO: 2598 - DNA, 19 bp, Artificial Sequence
  Description of Artificial Sequence: Synthetic primer
ttcgcctaccgcagtgaac

SEQ ID NO: 2599 - DNA, 19 bp, Artificial Sequence
  Description of Artificial Sequence: Synthetic primer
tgcgagcccatgtctcaac

SEQ ID NO: 2600 - DNA, 46 bp, Artificial Sequence
  Description of Artificial Sequence: Synthetic primer
  Description of Combined DNA/RNA Molecule: Synthetic primer
tgcgagcccatgtctcaactagccctagccctgtaccccctgggag

SEQ ID NO: 2601 - DNA, 39 bp, Artificial Sequence; identical to SEQ ID NO: 2539
  Description of Artificial Sequence: Synthetic primer
  Description of Combined DNA/RNA Molecule: Synthetic primer

SEQ ID NO: 2602 - DNA, 39 bp, Artificial Sequence; identical to SEQ ID NO: 2540
  Description of Artificial Sequence: Synthetic primer
  Description of Combined DNA/RNA Molecule: Synthetic primer

SEQ ID NO: 2603 - DNA, 46 bp, Artificial Sequence
  Description of Artificial Sequence: Synthetic primer
  Description of Combined DNA/RNA Molecule: Synthetic primer
acgacgacgacttgacgaacataatgggcagggtgcctggcccccg

SEQ ID NO: 2604 - DNA, 46 bp, Artificial Sequence
  Description of Artificial Sequence: Synthetic oligonucleotide
  Description of Combined DNA/RNA Molecule: Synthetic oligonucleotide
ttgcatttcgttagcgacacaggagcaaacctgaggctacagaggg

SEQ ID NO: 2605 - DNA, 53 bp, Artificial Sequence
  Description of Artificial Sequence: Synthetic oligonucleotide
gagaaccagggctgtctgtcttctcactttgggtgtgagtcgatctacccgca

SEQ ID NO: 2606 - DNA, 29 bp, Artificial Sequence
  Description of Artificial Sequence: Synthetic probe
ttggctacagagaaccagggctgtctgtc

SEQ ID NO: 2607 - DNA, 21 bp, Artificial Sequence
  Description of Artificial Sequence: Synthetic primer
ttgcatttcgttagcgacaca

SEQ ID NO: 2608 - DNA, 20 bp, Artificial Sequence
  Description of Artificial Sequence: Synthetic primer
tgcgggtagatcgactcaca

SEQ ID NO: 2609 - DNA, 43 bp, Artificial Sequence
  Description of Artificial Sequence: Synthetic primer
  Description of Combined DNA/RNA Molecule: Synthetic primer
tgcgggtagatcgactcacagtgcctggcccccaaaatgagag

SEQ ID NO: 2610 - DNA, 38 bp, Artificial Sequence
  Description of Artificial Sequence: Synthetic primer
  Description of Combined DNA/RNA Molecule: Synthetic primer
acgacgacgacgaagcaggcagaggcagccacagtgct

SEQ ID NO: 2611 - DNA, 37 bp, Artificial Sequence
  Description of Artificial Sequence: Synthetic primer
  Description of Combined DNA/RNA Molecule: Synthetic primer
acgacgacgacgaagcagcaggcagaggcagccacaa

SEQ ID NO: 2612 - DNA, 47 bp, Artificial Sequence
  Description of Artificial Sequence: Synthetic primer
  Description of Combined DNA/RNA Molecule: Synthetic primer
acgacgacgacttgacgaacataatgcctgggcctgctgctcccctc

SEQ ID NO: 2613 - DNA, 46 bp, Artificial Sequence
  Description of Artificial Sequence: Synthetic oligonucleotide
  Description of Combined DNA/RNA Molecule: Synthetic oligonucleotide
ttgcatttcgttagcgacacagcctttgtgtgcagtggacacagtg

SEQ ID NO: 2614 - DNA, 44 bp, Artificial Sequence
  Description of Artificial Sequence: Synthetic oligonucleotide
cagcaatgggctgctccagcccactgtgagtcgatctacccgca

SEQ ID NO: 2615 - DNA, 25 bp, Artificial Sequence
  Description of Artificial Sequence: Synthetic probe
ttgtggacacagcaatgggctgctc

SEQ ID NO: 2616 - DNA, 21 bp, Artificial Sequence
  Description of Artificial Sequence: Synthetic primer
ttgcatttcgttagcgacaca

SEQ ID NO: 2617 - DNA, 20 bp, Artificial Sequence
  Description of Artificial Sequence: Synthetic primer
tgcgggtagatcgactcaca

SEQ ID NO: 2618 - DNA, 42 bp, Artificial Sequence
  Description of Artificial Sequence: Synthetic primer
  Description of Combined DNA/RNA Molecule: Synthetic primer
tgcgggtagatcgactcacacccttgggctgtgggttggagt

SEQ ID NO: 2619 - DNA, 40 bp, Artificial Sequence
  Description of Artificial Sequence: Synthetic primer
  Description of Combined DNA/RNA Molecule: Synthetic primer
acgacgacgacgaaggcatacccccaagaggtacagggcc

SEQ ID NO: 2620 - DNA, 40 bp, Artificial Sequence
  Description of Artificial Sequence: Synthetic primer
  Description of Combined DNA/RNA Molecule: Synthetic primer
acgacgacgacgaagccacaagggcatacccccaagggat

SEQ ID NO: 2621 - DNA, 54 bp, Artificial Sequence
  Description of Artificial Sequence: Synthetic primer
  Description of Combined DNA/RNA Molecule: Synthetic primer
acgacgacgacttgacgaacataatctctctctgcttcctgacctgcacuctgt

SEQ ID NO: 2622 - DNA, 45 bp, Artificial Sequence
  Description of Artificial Sequence: Synthetic oligonucleotide
  Description of Combined DNA/RNA Molecule: Synthetic oligonucleotide
taccactcatcttctgcgacacaggctgtgcagttggacagggtt

SEQ ID NO: 2623 - DNA, 40 bp, Artificial Sequence
  Description of Artificial Sequence: Synthetic oligonucleotide
gggccctgtgccccactgcatgtgagtcgatctacccgca

SEQ ID NO: 2624 - DNA, 21 bp, Artificial Sequence
  Description of Artificial Sequence: Synthetic probe
ttttggacagggccctgtgcc

SEQ ID NO: 2625 - DNA, 21 bp, Artificial Sequence
  Description of Artificial Sequence: Synthetic primer
taccactcatcttctgcgaca

SEQ ID NO: 2626 - DNA, 20 bp, Artificial Sequence
  Description of Artificial Sequence: Synthetic primer
tgcgggtagatcgactcaca

SEQ ID NO: 2627 - DNA, 48 bp, Artificial Sequence
  Description of Artificial Sequence: Synthetic primer
  Description of Combined DNA/RNA Molecule: Synthetic primer
tgcgggtagatcgactcacactctgcttcctgacctgcactttgcagc

SEQ ID NO: 2628 - DNA, 48 bp, Artificial Sequence
  Description of Artificial Sequence: Synthetic primer
  Description of Combined DNA/RNA Molecule: Synthetic primer
acgacgacgacgaacagggagcccacaaagttttacagatacaataat

SEQ ID NO: 2629 - DNA, 51 bp, Artificial Sequence
  Description of Artificial Sequence: Synthetic primer
  Description of Combined DNA/RNA Molecule: Synthetic primer
acgacgacgacgaaagggagcccacaaagttttacagatacaataacttat

SEQ ID NO: 2630 - DNA, 51 bp, Artificial Sequence
  Description of Artificial Sequence: Synthetic primer
  Description of Combined DNA/RNA Molecule: Synthetic primer
acgacgacgacttgacgaacataatagtggtctgggtccttgccaauattg

SEQ ID NO: 2631 - DNA, 55 bp, Artificial Sequence
  Description of Artificial Sequence: Synthetic oligonucleotide
  Description of Combined DNA/RNA Molecule: Synthetic oligonucleotide
tctcatgggcgctagtatcaacccaatttttacaacccagcaagaggtcaagcca

SEQ ID NO: 2632 - DNA, 63 bp, Artificial Sequence
  Description of Artificial Sequence: Synthetic oligonucleotide
agctggtacaatatcctgactgtaaatcatccagtggtaatgtttccctgattgatacccgca

SEQ ID NO: 2633 - DNA, 38 bp, Artificial Sequence
  Description of Artificial Sequence: Synthetic probe
ttgaggtcaagctggtacaatatcctgactgtaaatca

SEQ ID NO: 2634 - DNA, 22 bp, Artificial Sequence
  Description of Artificial Sequence: Synthetic primer
tctcatgggcgctagtatcaac

SEQ ID NO: 2635 - DNA, 22 bp, Artificial Sequence
  Description of Artificial Sequence: Synthetic primer
tgcgggtatcaatcagggaaac

SEQ ID NO: 2636 - DNA, 54 bp, Artificial Sequence
  Description of Artificial Sequence: Synthetic primer
  Description of Combined DNA/RNA Molecule: Synthetic primer
tgcgggtatcaatcagggaaacgggtccttgccaatattaccactgggtgattc

SEQ ID NO: 2637 - DNA, 39 bp, Artificial Sequence
  Description of Artificial Sequence: Synthetic primer
  Description of Combined DNA/RNA Molecule: Synthetic primer
acgacgacgacgaagccacaagggcatacccccaaggga

SEQ ID NO: 2638 - DNA, 41 bp, Artificial Sequence
  Description of Artificial Sequence: Synthetic primer
  Description of Combined DNA/RNA Molecule: Synthetic primer
acgacgacgacgaaccacaagggcatacccccaaggggtat

SEQ ID NO: 2639 - DNA, 54 bp, Artificial Sequence; identical to SEQ ID NO: 2621
  Description of Artificial Sequence: Synthetic primer
  Description of Combined DNA/RNA Molecule: Synthetic primer

SEQ ID NO: 2640 - DNA, 45 bp, Artificial Sequence
  Description of Artificial Sequence: Synthetic oligonucleotide
  Description of Combined DNA/RNA Molecule: Synthetic oligonucleotide
tggatcgagacggaatgcaaccaggctgtgcagttggacagggtt

SEQ ID NO: 2641 - DNA, 43 bp, Artificial Sequence
  Description of Artificial Sequence: Synthetic oligonucleotide
gggccctgtgccccactgcaggtttccctgattgatacccgca

SEQ ID NO: 2642 - DNA, 21 bp, Artificial Sequence
  Description of Artificial Sequence: Synthetic probe
ccttggacagggccctgtgcc

SEQ ID NO: 2643 - DNA, 21 bp, Artificial Sequence
  Description of Artificial Sequence: Synthetic primer
tggatcgagacggaatgcaac

SEQ ID NO: 2644 - DNA, 22 bp, Artificial Sequence
  Description of Artificial Sequence: Synthetic primer
tgcgggtatcaatcagggaaac

SEQ ID NO: 2645 - DNA, 50 bp, Artificial Sequence
  Description of Artificial Sequence: Synthetic primer
  Description of Combined DNA/RNA Molecule: Synthetic primer
tgcgggtatcaatcagggaaacctctgcttcctgacctgcactttgcagc

SEQ ID NO: 2646 - DNA, 38 bp, Artificial Sequence
  Description of Artificial Sequence: Synthetic primer
  Description of Combined DNA/RNA Molecule: Synthetic primer
acgacgacgacgaacaggctgtgcagttgggcagggct

SEQ ID NO: 2647 - DNA, 37 bp, Artificial Sequence
  Description of Artificial Sequence: Synthetic primer
  Description of Combined DNA/RNA Molecule: Synthetic primer
acgacgacgacgaagtgcagttgggcagggccctgta

SEQ ID NO: 2648 - DNA, 51 bp, Artificial Sequence
  Description of Artificial Sequence: Synthetic primer
  Description of Combined DNA/RNA Molecule: Synthetic primer
acgacgacgacttgacgaacataatggagtgccctggtctgcatccagtga

SEQ ID NO: 2649 - DNA, 46 bp, Artificial Sequence
  Description of Artificial Sequence: Synthetic oligonucleotide
  Description of Combined DNA/RNA Molecule: Synthetic oligonucleotide
tcctgagggacaaatacacacctgccccactgcagagtacaggttg

SEQ ID NO: 2650 - DNA, 51 bp, Artificial Sequence
  Description of Artificial Sequence: Synthetic oligonucleotide
ggtcaggaagcagagagagaagcagctgtgggtaggtaaggaagtcacgca

SEQ ID NO: 2651 - DNA, 32 bp, Artificial Sequence
  Description of Artificial Sequence: Synthetic probe
ttgagtacaggtcaggaagcagagagagaagc

SEQ ID NO: 2652 - DNA, 22 bp, Artificial Sequence
  Description of Artificial Sequence: Synthetic primer
tcctgagggacaaatacacacc

SEQ ID NO: 2653 - DNA, 21 bp, Artificial Sequence
  Description of Artificial Sequence: Synthetic primer
tgcgtgacttccttacctacc

SEQ ID NO: 2654 - DNA, 46 bp, Artificial Sequence
  Description of Artificial Sequence: Synthetic primer
  Description of Combined DNA/RNA Molecule: Synthetic primer
tgcgtgacttccttacctacctgccctggtctgcatccaatggatc

SEQ ID NO: 2655 - DNA, 36 bp, Artificial Sequence
  Description of Artificial Sequence: Synthetic primer
  Description of Combined DNA/RNA Molecule: Synthetic primer
acgacgacgacgaagggctgcagcctgcacacagcg

SEQ ID NO: 2656 - DNA, 38 bp, Artificial Sequence
  Description of Artificial Sequence: Synthetic primer
  Description of Combined DNA/RNA Molecule: Synthetic primer
acgacgacgacgaagctgcagcctgcacacagcaggaa

SEQ ID NO: 2657 - DNA, 51 bp, Artificial Sequence
  Description of Artificial Sequence: Synthetic primer
  Description of Combined DNA/RNA Molecule: Synthetic primer
acgacgacgacttgacgaacataatgctgccagaccctgtgcactcactgg

SEQ ID NO: 2658 - DNA, 54 bp, Artificial Sequence
  Description of Artificial Sequence: Synthetic oligonucleotide
  Description of Combined DNA/RNA Molecule: Synthetic oligonucleotide
ttgcaacaggctaccgacccttctacaacttcaaggcagtcaacattcagggtg

SEQ ID NO: 2659 - DNA, 53 bp, Artificial Sequence
  Description of Artificial Sequence: Synthetic oligonucleotide
gggcaaactggtgtcactggagaagtaccacaggtaggtaaggaagtcacgca

SEQ ID NO: 2660 - DNA, 29 bp, Artificial Sequence
  Description of Artificial Sequence: Synthetic probe
ttacattcagggcaaactggtgtcactgg

SEQ ID NO: 2661 - DNA, 19 bp, Artificial Sequence
  Description of Artificial Sequence: Synthetic primer
ttgcaacaggctaccgacc

SEQ ID NO: 2662 - DNA, 21 bp, Artificial Sequence
  Description of Artificial Sequence: Synthetic primer
tgcgtgacttccttacctacc

SEQ ID NO: 2663 - DNA, 49 bp, Artificial Sequence
  Description of Artificial Sequence: Synthetic primer
  Description of Combined DNA/RNA Molecule: Synthetic primer
tgcgtgacttccttacctaccaccctgtgcactcactgatctatggtat

SEQ ID NO: 2664 - DNA, 37 bp, Artificial Sequence
  Description of Artificial Sequence: Synthetic primer
  Description of Combined DNA/RNA Molecule: Synthetic primer
acgacgacgacgaacagccagcacaccccacacacag

SEQ ID NO: 2665 - DNA, 38 bp, Artificial Sequence
  Description of Artificial Sequence: Synthetic primer
  Description of Combined DNA/RNA Molecule: Synthetic primer
acgacgacgacgaaccatggcagccagcacaccccacg

SEQ ID NO: 2666 - DNA, 50 bp, Artificial Sequence
  Description of Artificial Sequence: Synthetic primer
  Description of Combined DNA/RNA Molecule: Synthetic primer
acgacgacgacttgacgaacataatcagtgccctgagtgcatgcagtggc

SEQ ID NO: 2667 - DNA, 51 bp, Artificial Sequence
  Description of Artificial Sequence: Synthetic oligonucleotide
  Description of Combined DNA/RNA Molecule: Synthetic oligonucleotide
taagcctgcttttccgaaacaagggcaatgaacacaccacatctcaggctt

SEQ ID NO: 2668 - DNA, 39 bp, Artificial Sequence
  Description of Artificial Sequence: Synthetic oligonucleotide
ggcccaggccccagctgcttgtattgcgccaggatagca

SEQ ID NO: 2669 - DNA, 22 bp, Artificial Sequence
  Description of Artificial Sequence: Synthetic probe
ttcatctcaggcccaggcccca

SEQ ID NO: 2670 - DNA, 22 bp, Artificial Sequence
  Description of Artificial Sequence: Synthetic primer
taagcctgcttttccgaaacaa

SEQ ID NO: 2671 - DNA, 21 bp, Artificial Sequence
  Description of Artificial Sequence: Synthetic primer
tgctatcctggcgcaatacaa

SEQ ID NO: 2672 - DNA, 47 bp, Artificial Sequence
  Description of Artificial Sequence: Synthetic primer
  Description of Combined DNA/RNA Molecule: Synthetic primer
tgctatcctggcgcaatacaaagtgccctgagtgcatgcaatggtaa

SEQ ID NO: 2673 - DNA, 38 bp, Artificial Sequence
  Description of Artificial Sequence: Synthetic primer
  Description of Combined DNA/RNA Molecule: Synthetic primer
acgacgacgacgaaaccagaggcagcaagagcaggccg

SEQ ID NO: 2674 - DNA, 37 bp, Artificial Sequence
  Description of Artificial Sequence: Synthetic primer
  Description of Combined DNA/RNA Molecule: Synthetic primer
acgacgacgacgaacagcaccagaggcagcaagagcg

SEQ ID NO: 2675 - DNA, 53 bp, Artificial Sequence
  Description of Artificial Sequence: Synthetic primer
  Description of Combined DNA/RNA Molecule: Synthetic primer
acgacgacgacttgacgaacataattgaggagaggctgtctctgtgacugcta

SEQ ID NO: 2676 - DNA, 41 bp, Artificial Sequence
  Description of Artificial Sequence: Synthetic oligonucleotide
  Description of Combined DNA/RNA Molecule: Synthetic oligonucleotide
ttggcaactctccacccaatggccaggctggccgcagactt

SEQ ID NO: 2677 - DNA, 48 bp, Artificial Sequence
  Description of Artificial Sequence: Synthetic oligonucleotide
gacccagacagtcaggagcaggcacagttgtattgcgccaggatagca

SEQ ID NO: 2678 - DNA, 24 bp, Artificial Sequence
  Description of Artificial Sequence: Synthetic probe
aaggccgcagacccagacagtcag

SEQ ID NO: 2679 - DNA, 19 bp, Artificial Sequence
  Description of Artificial Sequence: Synthetic primer
ttggcaactctccacccaa

SEQ ID NO: 2680 - DNA, 21 bp, Artificial Sequence
  Description of Artificial Sequence: Synthetic primer
tgctatcctggcgcaatacaa

SEQ ID NO: 2681 - DNA, 48 bp, Artificial Sequence
  Description of Artificial Sequence: Synthetic primer
  Description of Combined DNA/RNA Molecule: Synthetic primer
tgctatcctggcgcaatacaatgtctctgtgactgctgtgcttgctct

SEQ ID NO: 2682 - DNA, 42 bp, Artificial Sequence
  Description of Artificial Sequence: Synthetic primer
  Description of Combined DNA/RNA Molecule: Synthetic primer
acgacgacgacgaacccacttcacagggttcacaccagggag

SEQ ID NO: 2683 - DNA, 44 bp, Artificial Sequence
  Description of Artificial Sequence: Synthetic primer
  Description of Combined DNA/RNA Molecule: Synthetic primer
acgacgacgacgaactcactccaatcccacttcacagggutcat

SEQ ID NO: 2684 - DNA, 55 bp, Artificial Sequence
  Description of Artificial Sequence: Synthetic primer
  Description of Combined DNA/RNA Molecule: Synthetic primer
acgacgacgacttgacgaacataattttatccttagctgtgcctccacccccagt

SEQ ID NO: 2685 - DNA, 50 bp, Artificial Sequence
  Description of Artificial Sequence: Synthetic oligonucleotide
  Description of Combined DNA/RNA Molecule: Synthetic oligonucleotide
tcgacgaatctgctcagacaagcaggagagggtgaattatcctcagatcg

SEQ ID NO: 2686 - DNA, 53 bp, Artificial Sequence
  Description of Artificial Sequence: Synthetic oligonucleotide
gattaatcactccagagccacttctccaccactcttgaagcagcgtctgagca

SEQ ID NO: 2687 - DNA, 35 bp, Artificial Sequence
  Description of Artificial Sequence: Synthetic probe
aaatcctcagattaatcactccagagccacttctc

SEQ ID NO: 2688 - DNA, 21 bp, Artificial Sequence
  Description of Artificial Sequence: Synthetic primer
tcgacgaatctgctcagacaa

SEQ ID NO: 2689 - DNA, 19 bp, Artificial Sequence
  Description of Artificial Sequence: Synthetic primer
tgctcagacgctgcttcaa

SEQ ID NO: 2690 - DNA, 46 bp, Artificial Sequence
  Description of Artificial Sequence: Synthetic primer
  Description of Combined DNA/RNA Molecule: Synthetic primer
tgctcagacgctgcttcaacacccccagcatttggagtgatggagg

SEQ ID NO: 2691 - DNA, 39 bp, Artificial Sequence
  Description of Artificial Sequence: Synthetic primer
  Description of Combined DNA/RNA Molecule: Synthetic primer
acgacgacgacgaacaaagtgccagcagcaggcagtggt

SEQ ID NO: 2692 - DNA, 39 bp, Artificial Sequence
  Description of Artificial Sequence: Synthetic primer
  Description of Combined DNA/RNA Molecule: Synthetic primer
acgacgacgacgaagcagccaaagtgccagcagcaggcg

SEQ ID NO: 2693 - DNA, 52 bp, Artificial Sequence
  Description of Artificial Sequence: Synthetic primer
  Description of Combined DNA/RNA Molecule: Synthetic primer
acgacgacgacttgacgaacataatgctgtgtacctgggtgctctgcugcta

SEQ ID NO: 2694 - DNA, 46 bp, Artificial Sequence
  Description of Artificial Sequence: Synthetic oligonucleotide
  Description of Combined DNA/RNA Molecule: Synthetic oligonucleotide
tcgacgaatctgctcagacaagcagaaagggcccagccgcagcctt

SEQ ID NO: 2695 - DNA, 37 bp, Artificial Sequence
  Description of Artificial Sequence: Synthetic oligonucleotide
gccccagggagcagcagcttgaagcagcgtctgagca

SEQ ID NO: 2696 - DNA, 18 bp, Artificial Sequence
  Description of Artificial Sequence: Synthetic probe
ttagccgcagccccaggg

SEQ ID NO: 2697 - DNA, 21 bp, Artificial Sequence
  Description of Artificial Sequence: Synthetic primer
tcgacgaatctgctcagacaa

SEQ ID NO: 2698 - DNA, 19 bp, Artificial Sequence
  Description of Artificial Sequence: Synthetic primer
tgctcagacgctgcttcaa

SEQ ID NO: 2699 - DNA, 43 bp, Artificial Sequence
  Description of Artificial Sequence: Synthetic primer
  Description of Combined DNA/RNA Molecule: Synthetic primer
tgctcagacgctgcttcaagtgctctgctgctgctgttgccct

SEQ ID NO: 2700 - DNA, 40 bp, Artificial Sequence
  Description of Artificial Sequence: Synthetic primer
  Description of Combined DNA/RNA Molecule: Synthetic primer
acgacgacgacgaacctcccctgcttttggctccacaagc

SEQ ID NO: 2701 - DNA, 40 bp, Artificial Sequence
  Description of Artificial Sequence: Synthetic primer
  Description of Combined DNA/RNA Molecule: Synthetic primer
acgacgacgacgaacccctgcttttggctccacaagtgct

SEQ ID NO: 2702 - DNA, 50 bp, Artificial Sequence
  Description of Artificial Sequence: Synthetic primer
  Description of Combined DNA/RNA Molecule: Synthetic primer
acgacgacgacttgacgaacataatggatgagggtgaggatggacugccg

SEQ ID NO: 2703 - DNA, 49 bp, Artificial Sequence
  Description of Artificial Sequence: Synthetic oligonucleotide
  Description of Combined DNA/RNA Molecule: Synthetic oligonucleotide
tttccgccgctacaaccaaccacttgagtcaggagaggtccccaggctg

SEQ ID NO: 2704 - DNA, 39 bp, Artificial Sequence
  Description of Artificial Sequence: Synthetic oligonucleotide
ggccaccccaactgcccaccttgaagcagcgtctgagca

SEQ ID NO: 2705 - DNA, 21 bp, Artificial Sequence
  Description of Artificial Sequence: Synthetic probe
ttgtccccaggccaccccaac

SEQ ID NO: 2706 - DNA, 19 bp, Artificial Sequence
  Description of Artificial Sequence: Synthetic primer
tttccgccgctacaaccaa

SEQ ID NO: 2707 - DNA, 19 bp, Artificial Sequence
  Description of Artificial Sequence: Synthetic primer
tgctcagacgctgcttcaa

SEQ ID NO: 2708 - DNA, 43 bp, Artificial Sequence
  Description of Artificial Sequence: Synthetic primer
  Description of Combined DNA/RNA Molecule: Synthetic primer
tgctcagacgctgcttcaaatggactgccaggtgggatgggcg

SEQ ID NO: 2709 - DNA, 42 bp, Artificial Sequence
  Description of Artificial Sequence: Synthetic primer
  Description of Combined DNA/RNA Molecule: Synthetic primer
acgacgacgacgaacacaggctcacttacaggcagcagtgaa

SEQ ID NO: 2710 - DNA, 42 bp, Artificial Sequence
  Description of Artificial Sequence: Synthetic primer
  Description of Combined DNA/RNA Molecule: Synthetic primer
acgacgacgacgaagcagggcaacacaggctcacttacaggt

SEQ ID NO: 2711 - DNA, 51 bp, Artificial Sequence
  Description of Artificial Sequence: Synthetic primer
  Description of Combined DNA/RNA Molecule: Synthetic primer
acgacgacgacttgacgaacataatcttgggctctggctcctgctcagcta

SEQ ID NO: 2712 - DNA, 47 bp, Artificial Sequence
  Description of Artificial Sequence: Synthetic oligonucleotide
  Description of Combined DNA/RNA Molecule: Synthetic oligonucleotide
tcagtgaaaacacatccacccaggtgggccagagctcatacaggcgg

SEQ ID NO: 2713 - DNA, 39 bp, Artificial Sequence
  Description of Artificial Sequence: Synthetic oligonucleotide
ggcaacccccaggcagcagctggtgagcagggatgagca

SEQ ID NO: 2714 - DNA, 25 bp, Artificial Sequence
  Description of Artificial Sequence: Synthetic probe
tttcatacaggcaacccccaggcag

SEQ ID NO: 2715 - DNA, 22 bp, Artificial Sequence
  Description of Artificial Sequence: Synthetic primer
tcagtgaaaacacatccaccca

SEQ ID NO: 2716 - DNA, 19 bp, Artificial Sequence
  Description of Artificial Sequence: Synthetic primer
tgctcatccctgctcacca

SEQ ID NO: 2717 - DNA, 44 bp, Artificial Sequence
  Description of Artificial Sequence: Synthetic primer
  Description of Combined DNA/RNA Molecule: Synthetic primer
tgctcatccctgctcaccactggctcctgctcagctgttgctgt

SEQ ID NO: 2718 - DNA, 42 bp, Artificial Sequence
  Description of Artificial Sequence: Synthetic primer
  Description of Combined DNA/RNA Molecule: Synthetic primer
acgacgacgacgaacagtcatccaggatgaggctgcagtgat

SEQ ID NO: 2719 - DNA, 40 bp, Artificial Sequence
  Description of Artificial Sequence: Synthetic primer
  Description of Combined DNA/RNA Molecule: Synthetic primer
acgacgacgacgaaccacagagcccccagtcatccaggac

SEQ ID NO: 2720 - DNA, 51 bp, Artificial Sequence
  Description of Artificial Sequence: Synthetic primer
  Description of Combined DNA/RNA Molecule: Synthetic primer
acgacgacgacttgacgaacataatgtttcccctggctatgctgccactga

SEQ ID NO: 2721 - DNA, 48 bp, Artificial Sequence
  Description of Artificial Sequence: Synthetic oligonucleotide
  Description of Combined DNA/RNA Molecule: Synthetic oligonucleotide
tcgtagactcgctatcgccagatacaggagttgcagggcatcagggtt

SEQ ID NO: 2722 - DNA, 41 bp, Artificial Sequence
  Description of Artificial Sequence: Synthetic oligonucleotide
gggccagggccagtgacaagtgtggtgagcagggatgagca

SEQ ID NO: 2723 - DNA, 20 bp, Artificial Sequence
  Description of Artificial Sequence: Synthetic probe
ttggcatcagggccagggcc

SEQ ID NO: 2724 - DNA, 20 bp, Artificial Sequence
  Description of Artificial Sequence: Synthetic primer
tcgtagactcgctatcgcca

SEQ ID NO: 2725 - DNA, 19 bp, Artificial Sequence
  Description of Artificial Sequence: Synthetic primer
tgctcatccctgctcacca

SEQ ID NO: 2726 - DNA, 44 bp, Artificial Sequence
  Description of Artificial Sequence: Synthetic primer
  Description of Combined DNA/RNA Molecule: Synthetic primer
tgctcatccctgctcaccacccctggctatgctgccattggcct

SEQ ID NO: 2727 - DNA, 36 bp, Artificial Sequence
  Description of Artificial Sequence: Synthetic primer
  Description of Combined DNA/RNA Molecule: Synthetic primer
acgacgacgacgaaagggaaggaggctggcaaagga

SEQ ID NO: 2728 - DNA, 41 bp, Artificial Sequence
  Description of Artificial Sequence: Synthetic primer
  Description of Combined DNA/RNA Molecule: Synthetic primer
acgacgacgacgaactcccccacagccaaaagggaagggag

SEQ ID NO: 2729 - DNA, 50 bp, Artificial Sequence
  Description of Artificial Sequence: Synthetic primer
  Description of Combined DNA/RNA Molecule: Synthetic primer
acgacgacgacttgacgaacataatgcctgaggacctggtgcaacutgcc

SEQ ID NO: 2730 - DNA, 45 bp, Artificial Sequence
  Description of Artificial Sequence: Synthetic oligonucleotide
  Description of Combined DNA/RNA Molecule: Synthetic oligonucleotide
ttgcacccgcgacataaccgacaggcttccaggcaccgcagcatt

SEQ ID NO: 2731 - DNA, 43 bp, Artificial Sequence
  Description of Artificial Sequence: Synthetic oligonucleotide
gcaccaagccctcagctgcccggtaattcactcgaacggagca

SEQ ID NO: 2732 - DNA, 22 bp, Artificial Sequence
  Description of Artificial Sequence: Synthetic probe
ttcaccgcagcaccaagccctc

SEQ ID NO: 2733 - DNA, 19 bp, Artificial Sequence
  Description of Artificial Sequence: Synthetic primer
ttgcacccgcgacataacc

SEQ ID NO: 2734 - DNA, 22 bp, Artificial Sequence
  Description of Artificial Sequence: Synthetic primer
tgctccgttcgagtgaattacc

SEQ ID NO: 2735 - DNA, 47 bp, Artificial Sequence
  Description of Artificial Sequence: Synthetic primer
  Description of Combined DNA/RNA Molecule: Synthetic primer
tgctccgttcgagtgaattaccgggacctggtgcaacttgttgggcg

SEQ ID NO: 2736 - DNA, 36 bp, Artificial Sequence
  Description of Artificial Sequence: Synthetic primer
  Description of Combined DNA/RNA Molecule: Synthetic primer
acgacgacgacgaagcaggaggctccccccagggac

SEQ ID NO: 2737 - DNA, 39 bp, Artificial Sequence
  Description of Artificial Sequence: Synthetic primer
  Description of Combined DNA/RNA Molecule: Synthetic primer
acgacgacgacgaaagagagggcaacttgcaggaggctt

SEQ ID NO: 2738 - DNA, 53 bp, Artificial Sequence
  Description of Artificial Sequence: Synthetic primer
  Description of Combined DNA/RNA Molecule: Synthetic primer
acgacgacgacttgacgaacataatggagaggaccctgaggactgagaacccg

SEQ ID NO: 2739 - DNA, 51 bp, Artificial Sequence
  Description of Artificial Sequence: Synthetic oligonucleotide
  Description of Combined DNA/RNA Molecule: Synthetic oligonucleotide
tccggcctttgacgataccggcagaggcaaaggtaattaagcaacagggca

SEQ ID NO: 2740 - DNA, 44 bp, Artificial Sequence
  Description of Artificial Sequence: Synthetic oligonucleotide
gggagtggcaggccagcactggggtaattcactcgaacggagca

SEQ ID NO: 2741 - DNA, 23 bp, Artificial Sequence
  Description of Artificial Sequence: Synthetic probe
ttagcaacagggagtggcaggcc

SEQ ID NO: 2742 - DNA, 19 bp, Artificial Sequence
  Description of Artificial Sequence: Synthetic primer
tccggcctttgacgatacc

SEQ ID NO: 2743 - DNA, 22 bp, Artificial Sequence
  Description of Artificial Sequence: Synthetic primer
tgctccgttcgagtgaattacc

SEQ ID NO: 2744 - DNA, 51 bp, Artificial Sequence
  Description of Artificial Sequence: Synthetic primer
  Description of Combined DNA/RNA Molecule: Synthetic primer
tgctccgttcgagtgaattaccgaccctgaggactgagaacccaatgctga

SEQ ID NO: 2745 - DNA, 37 bp, Artificial Sequence
  Description of Artificial Sequence: Synthetic primer
  Description of Combined DNA/RNA Molecule: Synthetic primer
acgacgacgacgaaccacagggcctcccaccaccccc

SEQ ID NO: 2746 - DNA, 36 bp, Artificial Sequence
  Description of Artificial Sequence: Synthetic primer
  Description of Combined DNA/RNA Molecule: Synthetic primer
acgacgacgacgaagcaggccacagggcctcccact

SEQ ID NO: 2747 - DNA, 51 bp, Artificial Sequence
  Description of Artificial Sequence: Synthetic primer
  Description of Combined DNA/RNA Molecule: Synthetic primer
acgacgacgacttgacgaacataatcccagacaggtggtgatggcagaggg

SEQ ID NO: 2748 - DNA, 41 bp, Artificial Sequence
  Description of Artificial Sequence: Synthetic oligonucleotide
  Description of Combined DNA/RNA Molecule: Synthetic oligonucleotide
tccggcctttgacgataccgcacccccagcacctcaggatt

SEQ ID NO: 2749 - DNA, 50 bp, Artificial Sequence
  Description of Artificial Sequence: Synthetic oligonucleotide
ggacccccacacccacatcacttactccggtaattcactcgaacggagca

SEQ ID NO: 2750 - DNA, 23 bp, Artificial Sequence
  Description of Artificial Sequence: Synthetic probe
ttcacctcaggacccccacaccc

SEQ ID NO: 2751 - DNA, 19 bp, Artificial Sequence
  Description of Artificial Sequence: Synthetic primer
tccggcctttgacgatacc

SEQ ID NO: 2752 - DNA, 22 bp, Artificial Sequence
  Description of Artificial Sequence: Synthetic primer
tgctccgttcgagtgaattacc

SEQ ID NO: 2753 - DNA, 52 bp, Artificial Sequence
  Description of Artificial Sequence: Synthetic primer
  Description of Combined DNA/RNA Molecule: Synthetic primer
tgctccgttcgagtgaattacctggtgatggcagaggagtaagtggtgtgga

SEQ ID NO: 2754 - DNA, 38 bp, Artificial Sequence
  Description of Artificial Sequence: Synthetic primer
  Description of Combined DNA/RNA Molecule: Synthetic primer
acgacgacgacgaagcatgaggccacagcagcaugggc

SEQ ID NO: 2755 - DNA, 37 bp, Artificial Sequence
  Description of Artificial Sequence: Synthetic primer
  Description of Combined DNA/RNA Molecule: Synthetic primer
acgacgacgacgaagaggccacagcagcatgggtggt

SEQ ID NO: 2756 - DNA, 49 bp, Artificial Sequence
  Description of Artificial Sequence: Synthetic primer
  Description of Combined DNA/RNA Molecule: Synthetic primer
acgacgacgacttgacgaacataatgcagcagctggctgacccagagta

SEQ ID NO: 2757 - DNA, 45 bp, Artificial Sequence
  Description of Artificial Sequence: Synthetic oligonucleotide
  Description of Combined DNA/RNA Molecule: Synthetic oligonucleotide
tcgcggaaagtcccagtaaccctgtgcccatcctcactcactctt

SEQ ID NO: 2758 - DNA, 49 bp, Artificial Sequence
  Description of Artificial Sequence: Synthetic oligonucleotide
ctcccactcaccccagcacacacacttacgttggcctgtaagcgttcca

SEQ ID NO: 2759 - DNA, 26 bp, Artificial Sequence
  Description of Artificial Sequence: Synthetic probe
tttcactcactcccactcaccccagc

SEQ ID NO: 2760 - DNA, 20 bp, Artificial Sequence
  Description of Artificial Sequence: Synthetic primer
tcgcggaaagtcccagtaac

SEQ ID NO: 2761 - DNA, 20 bp, Artificial Sequence
  Description of Artificial Sequence: Synthetic primer
tggaacgcttacaggccaac

SEQ ID NO: 2762 - DNA, 49 bp, Artificial Sequence
  Description of Artificial Sequence: Synthetic primer
  Description of Combined DNA/RNA Molecule: Synthetic primer
tggaacgcttacaggccaacctggctgacccagagtgtaagtatgtgta

SEQ ID NO: 2763 - DNA, 37 bp, Artificial Sequence
  Description of Artificial Sequence: Synthetic primer
  Description of Combined DNA/RNA Molecule: Synthetic primer
acgacgacgacgaacagagggcagcacccccagctgt

SEQ ID NO: 2764 - DNA, 39 bp, Artificial Sequence
  Description of Artificial Sequence: Synthetic primer
  Description of Combined DNA/RNA Molecule: Synthetic primer
acgacgacgacgaagagggacagagggcagcacccccaa

SEQ ID NO: 2765 - DNA, 60 bp, Artificial Sequence
  Description of Artificial Sequence: Synthetic primer
  Description of Combined DNA/RNA Molecule: Synthetic primer
acgacgacgacttgacgaacataatctggctaaattgggaagtgaaagttggatcucagt

SEQ ID NO: 2766 - DNA, 50 bp, Artificial Sequence
  Description of Artificial Sequence: Synthetic oligonucleotide
  Description of Combined DNA/RNA Molecule: Synthetic oligonucleotide
tgaacgctcaaacacgtgaacggcacatagaacaagcagctgtcaccaaa

SEQ ID NO: 2767 - DNA, 46 bp, Artificial Sequence
  Description of Artificial Sequence: Synthetic oligonucleotide
ccagggccaacaaagttgctccccaagttggcctgtaagcgttcca

SEQ ID NO: 2768 - DNA, 29 bp, Artificial Sequence
  Description of Artificial Sequence: Synthetic probe
ttgctgtcaccagggccaacaaagttgct

SEQ ID NO: 2769 - DNA, 21 bp, Artificial Sequence
  Description of Artificial Sequence: Synthetic primer
tgaacgctcaaacacgtgaac

SEQ ID NO: 2770 - DNA, 20 bp, Artificial Sequence
  Description of Artificial Sequence: Synthetic primer
tggaacgcttacaggccaac

SEQ ID NO: 2771 - DNA, 50 bp, Artificial Sequence
  Description of Artificial Sequence: Synthetic primer
  Description of Combined DNA/RNA Molecule: Synthetic primer
tggaacgcttacaggccaacagtgaaagttggatctcagccccctgggag

SEQ ID NO: 2772 - DNA, 36 bp, Artificial Sequence
  Description of Artificial Sequence: Synthetic primer
  Description of Combined DNA/RNA Molecule: Synthetic primer
acgacgacgacgaatgaggtggctgcagccacacct

SEQ ID NO: 2773 - DNA, 36 bp, Artificial Sequence
  Description of Artificial Sequence: Synthetic primer
  Description of Combined DNA/RNA Molecule: Synthetic primer
acgacgacgacgaagtggctgcacccagggcutgga

SEQ ID NO: 2774 - DNA, 53 bp, Artificial Sequence
  Description of Artificial Sequence: Synthetic primer
  Description of Combined DNA/RNA Molecule: Synthetic primer
acgacgacgacttgacgaacataatggtgtccttgctgaacctgtgcauggta

SEQ ID NO: 2775 - DNA, 48 bp, Artificial Sequence
  Description of Artificial Sequence: Synthetic oligonucleotide
  Description of Combined DNA/RNA Molecule: Synthetic oligonucleotide
tacacgtggatatctccgacccaccccttgctgccctctagcaugttg

SEQ ID NO: 2776 - DNA, 44 bp, Artificial Sequence
  Description of Artificial Sequence: Synthetic oligonucleotide
tgtcacctgtccccacagcacccggtgctagtcacacagttcca

SEQ ID NO: 2777 - DNA, 29 bp, Artificial Sequence
  Description of Artificial Sequence: Synthetic probe
tttctagcatgtcacctgtccccacagca

SEQ ID NO: 2778 - DNA, 21 bp, Artificial Sequence
  Description of Artificial Sequence: Synthetic primer
tacacgtggatatctccgacc

SEQ ID NO: 2779 - DNA, 21 bp, Artificial Sequence
  Description of Artificial Sequence: Synthetic primer
tggaactgtgtgactagcacc

SEQ ID NO: 2780 - DNA, 49 bp, Artificial Sequence
  Description of Artificial Sequence: Synthetic primer
  Description of Combined DNA/RNA Molecule: Synthetic primer
tggaactgtgtgactagcaccctgaacctgtgcatggtggtgatgggta

SEQ ID NO: 2781 - DNA, 38 bp, Artificial Sequence
  Description of Artificial Sequence: Synthetic primer
  Description of Combined DNA/RNA Molecule: Synthetic primer
acgacgacgacgaaggcttgctctcagctggcagccaa

SEQ ID NO: 2782 - DNA, 39 bp, Artificial Sequence
  Description of Artificial Sequence: Synthetic primer
  Description of Combined DNA/RNA Molecule: Synthetic primer
acgacgacgacgaaggcctccttctccacagggcutgcc

SEQ ID NO: 2783 - DNA, 53 bp, Artificial Sequence
  Description of Artificial Sequence: Synthetic primer
  Description of Combined DNA/RNA Molecule: Synthetic primer
acgacgacgacttgacgaacataatggtggaaacactgggaagaggcaggtgg

SEQ ID NO: 2784 - DNA, 47 bp, Artificial Sequence
  Description of Artificial Sequence: Synthetic oligonucleotide
  Description of Combined DNA/RNA Molecule: Synthetic oligonucleotide
tagcattcgagaacgcacccagtccccaagggacacttttcaacttg

SEQ ID NO: 2785 - DNA, 47 bp, Artificial Sequence
  Description of Artificial Sequence: Synthetic oligonucleotide
actcagagcacacagccctggagcacggtgctagtcacacagttcca

SEQ ID NO: 2786 - DNA, 30 bp, Artificial Sequence
  Description of Artificial Sequence: Synthetic probe
ttcttttcaactcagagcacacagccctgg

SEQ ID NO: 2787 - DNA, 19 bp, Artificial Sequence
  Description of Artificial Sequence: Synthetic primer
tagcattcgagaacgcacc

SEQ ID NO: 2788 - DNA, 21 bp, Artificial Sequence
  Description of Artificial Sequence: Synthetic primer
tggaactgtgtgactagcacc

SEQ ID NO: 2789 - DNA, 48 bp, Artificial Sequence
  Description of Artificial Sequence: Synthetic primer
  Description of Combined DNA/RNA Molecule: Synthetic primer
tggaactgtgtgactagcaccagaggcaggtgaagaggcatatgagcc

SEQ ID NO: 2790 - DNA, 40 bp, Artificial Sequence
  Description of Artificial Sequence: Synthetic primer
  Description of Combined DNA/RNA Molecule: Synthetic primer
acgacgacgacgaagttgtggaagcaggtgaggcacttgt

SEQ ID NO: 2791 - DNA, 40 bp, Artificial Sequence
  Description of Artificial Sequence: Synthetic primer
  Description of Combined DNA/RNA Molecule: Synthetic primer
acgacgacgacgaaggaagcaggtgaggcacttgcactta

SEQ ID NO: 2792 - DNA, 53 bp, Artificial Sequence
  Description of Artificial Sequence: Synthetic primer
  Description of Combined DNA/RNA Molecule: Synthetic primer
acgacgacgacttgacgaacataatctactgtgtgcagtgtgtgcagcugcta

SEQ ID NO: 2793 - DNA, 43 bp, Artificial Sequence
  Description of Artificial Sequence: Synthetic oligonucleotide
  Description of Combined DNA/RNA Molecule: Synthetic oligonucleotide
taaccgggcctaaagtgacagcacaaggccaccagacacactc

SEQ ID NO: 2794 - DNA, 49 bp, Artificial Sequence
  Description of Artificial Sequence: Synthetic oligonucleotide
caccttgcacacacacagcacctcacctgttacgtgatctccctctcca

SEQ ID NO: 2795 - DNA, 28 bp, Artificial Sequence
  Description of Artificial Sequence: Synthetic probe
ttccagacacaccttgcacacacacagc

SEQ ID NO: 2796 - DNA, 20 bp, Artificial Sequence
  Description of Artificial Sequence: Synthetic primer
taaccgggcctaaagtgaca

SEQ ID NO: 2797 - DNA, 22 bp, Artificial Sequence
  Description of Artificial Sequence: Synthetic primer
tggagagggagatcacgtaaca

SEQ ID NO: 2798 - DNA, 47 bp, Artificial Sequence
  Description of Artificial Sequence: Synthetic primer
  Description of Combined DNA/RNA Molecule: Synthetic primer
tggagagggagatcacgtaacagtgtgcagctgctgtgtcttggtga

SEQ ID NO: 2799 - DNA, 40 bp, Artificial Sequence
  Description of Artificial Sequence: Synthetic primer
  Description of Combined DNA/RNA Molecule: Synthetic primer
acgacgacgacgaacatttgtgggctggtagcccagaatg

SEQ ID NO: 2800 - DNA, 44 bp, Artificial Sequence
  Description of Artificial Sequence: Synthetic primer
  Description of Combined DNA/RNA Molecule: Synthetic primer
acgacgacgacgaacccacaaccagttccaccacatttgugggt

SEQ ID NO: 2801 - DNA, 54 bp, Artificial Sequence
  Description of Artificial Sequence: Synthetic primer
  Description of Combined DNA/RNA Molecule: Synthetic primer
acgacgacgacttgacgaacataatttgagcagctctgctactgtgtccuccaa

SEQ ID NO: 2802 - DNA, 47 bp, Artificial Sequence
  Description of Artificial Sequence: Synthetic oligonucleotide
  Description of Combined DNA/RNA Molecule: Synthetic oligonucleotide
tcgatggtcaatgagcttcacacccagaggccttcacagtcaacaca

SEQ ID NO: 2803 - DNA, 52 bp, Artificial Sequence
  Description of Artificial Sequence: Synthetic oligonucleotide
acatgcttcacacaggaacacagccacctctgttacgtgatctccctctcca

SEQ ID NO: 2804 - DNA, 32 bp, Artificial Sequence
  Description of Artificial Sequence: Synthetic probe
aaacagtcaacatgcttcacacaggaacacag

SEQ ID NO: 2805 - DNA, 22 bp, Artificial Sequence
  Description of Artificial Sequence: Synthetic primer
tcgatggtcaatgagcttcaca

SEQ ID NO: 2806 - DNA, 22 bp, Artificial Sequence
  Description of Artificial Sequence: Synthetic primer
tggagagggagatcacgtaaca

SEQ ID NO: 2807 - DNA, 51 bp, Artificial Sequence
  Description of Artificial Sequence: Synthetic primer
  Description of Combined DNA/RNA Molecule: Synthetic primer
tggagagggagatcacgtaacagctctgctactgtgtcctccagctgggaa

SEQ ID NO: 2808 - DNA, 42 bp, Artificial Sequence
  Description of Artificial Sequence: Synthetic primer
  Description of Combined DNA/RNA Molecule: Synthetic primer
acgacgacgacgaacataccagccaccatggaaggcactcaa

SEQ ID NO: 2809 - DNA, 43 bp, Artificial Sequence
  Description of Artificial Sequence: Synthetic primer
  Description of Combined DNA/RNA Molecule: Synthetic primer
acgacgacgacgaagcagacataccagccaccatggaaggcat

SEQ ID NO: 2810 - DNA, 51 bp, Artificial Sequence
  Description of Artificial Sequence: Synthetic primer
  Description of Combined DNA/RNA Molecule: Synthetic primer
acgacgacgacttgacgaacataatccccaacctgcagagtcctgaggtta

SEQ ID NO: 2811 - DNA, 49 bp, Artificial Sequence
  Description of Artificial Sequence: Synthetic oligonucleotide
  Description of Combined DNA/RNA Molecule: Synthetic oligonucleotide
tcgatggtcaatgagcttcacaagcaagtttgccctccagaacaaccca

SEQ ID NO: 2812 - DNA, 49 bp, Artificial Sequence
  Description of Artificial Sequence: Synthetic oligonucleotide
acctggaccaacccaccttccaacagctgttacgtgatctccctctcca

SEQ ID NO: 2813 - DNA, 29 bp, Artificial Sequence
  Description of Artificial Sequence: Synthetic probe
aacagaacaacctggaccaacccaccttc

SEQ ID NO: 2814 - DNA, 22 bp, Artificial Sequence
  Description of Artificial Sequence: Synthetic primer
tcgatggtcaatgagcttcaca

SEQ ID NO: 2815 - DNA, 22 bp, Artificial Sequence
  Description of Artificial Sequence: Synthetic primer
tggagagggagatcacgtaaca

SEQ ID NO: 2816 - DNA, 48 bp, Artificial Sequence
  Description of Artificial Sequence: Synthetic primer
  Description of Combined DNA/RNA Molecule: Synthetic primer
tggagagggagatcacgtaacagcagagtcctgaggttgggatgggtg

SEQ ID NO: 2817 - DNA, 44 bp, Artificial Sequence
  Description of Artificial Sequence: Synthetic primer
  Description of Combined DNA/RNA Molecule: Synthetic primer
acgacgacgacgaacaaggcagacattcccatacagccaggacc

SEQ ID NO: 2818 - DNA, 42 bp, Artificial Sequence
  Description of Artificial Sequence: Synthetic primer
  Description of Combined DNA/RNA Molecule: Synthetic primer
acgacgacgacgaaccagacccaaggcagacattcccatacg

SEQ ID NO: 2819 - DNA, 56 bp, Artificial Sequence
  Description of Artificial Sequence: Synthetic primer
  Description of Combined DNA/RNA Molecule: Synthetic primer
acgacgacgacttgacgaacataatccttcctttgatgaatgggctggatcugcta

SEQ ID NO: 2820 - DNA, 47 bp, Artificial Sequence
  Description of Artificial Sequence: Synthetic oligonucleotide
  Description of Combined DNA/RNA Molecule: Synthetic oligonucleotide
tctcgggaccacaatacgaacctccaagagcagccatggacaaccca

SEQ ID NO: 2821 - DNA, 41 bp, Artificial Sequence
  Description of Artificial Sequence: Synthetic oligonucleotide
acctggaggccagggactcaggttacgctaagctggtgcca

SEQ ID NO: 2822 - DNA, 23 bp, Artificial Sequence
  Description of Artificial Sequence: Synthetic probe
ttatggacaacctggaggccagg

SEQ ID NO: 2823 - DNA, 21 bp, Artificial Sequence
  Description of Artificial Sequence: Synthetic primer
tctcgggaccacaatacgaac

SEQ ID NO: 2824 - DNA, 20 bp, Artificial Sequence
  Description of Artificial Sequence: Synthetic primer
tggcaccagcttagcgtaac

SEQ ID NO: 2825 - DNA, 50 bp, Artificial Sequence
  Description of Artificial Sequence: Synthetic primer
  Description of Combined DNA/RNA Molecule: Synthetic primer
tggcaccagcttagcgtaacctttgatgaatgggctggatctgttgagtt

SEQ ID NO: 2826 - DNA, 49 bp, Artificial Sequence
  Description of Artificial Sequence: Synthetic primer
  Description of Combined DNA/RNA Molecule: Synthetic primer
acgacgacgacgaacatggaaaggtacttctgcttctcaaagcauttcc

SEQ ID NO: 2827 - DNA, 48 bp, Artificial Sequence
  Description of Artificial Sequence: Synthetic primer
  Description of Combined DNA/RNA Molecule: Synthetic primer
acgacgacgacgaacagcatggaaaggtacttctgcttctcaaagcac

SEQ ID NO: 2828 - DNA, 51 bp, Artificial Sequence
  Description of Artificial Sequence: Synthetic primer
  Description of Combined DNA/RNA Molecule: Synthetic primer
acgacgacgacttgacgaacataatgcagctctgtgggaagctggaggtga

SEQ ID NO: 2829 - DNA, 48 bp, Artificial Sequence
  Description of Artificial Sequence: Synthetic oligonucleotide
  Description of Combined DNA/RNA Molecule: Synthetic oligonucleotide
ttgctgtgcgcggtagaacctgcagctcagtgaacacagtacagcttt

SEQ ID NO: 2830 - DNA, 48 bp, Artificial Sequence
  Description of Artificial Sequence: Synthetic oligonucleotide
gctccaacaccccttcttggctttggtggttacgctaagctggtgcca

SEQ ID NO: 2831 - DNA, 29 bp, Artificial Sequence
  Description of Artificial Sequence: Synthetic probe
ttcagtacagctccaacaccccttcttgg

SEQ ID NO: 2832 - DNA, 19 bp, Artificial Sequence
  Description of Artificial Sequence: Synthetic primer
ttgctgtgcgcggtagaac

SEQ ID NO: 2833 - DNA, 20 bp, Artificial Sequence
  Description of Artificial Sequence: Synthetic primer
tggcaccagcttagcgtaac

SEQ ID NO: 2834 - DNA, 46 bp, Artificial Sequence
  Description of Artificial Sequence: Synthetic primer
  Description of Combined DNA/RNA Molecule: Synthetic primer
tggcaccagcttagcgtaacgctctgtgggaagctggagatggcaa

SEQ ID NO: 2835 - DNA, 48 bp, Artificial Sequence
  Description of Artificial Sequence: Synthetic primer
  Description of Combined DNA/RNA Molecule: Synthetic primer
acgacgacgacgaagctagcaagttcatcaccaaagagaagcaccagt

SEQ ID NO: 2836 - DNA, 49 bp, Artificial Sequence
  Description of Artificial Sequence: Synthetic primer
  Description of Combined DNA/RNA Molecule: Synthetic primer
acgacgacgacgaaggagctagagaaggaatacacagctagcaagttcg

SEQ ID NO: 2837 - DNA, 57 bp, Artificial Sequence
  Description of Artificial Sequence: Synthetic primer
  Description of Combined DNA/RNA Molecule: Synthetic primer
acgacgacgacttgacgaacataatctgaccaccttcttctctttgacctgcuggtc

SEQ ID NO: 2838 - DNA, 46 bp, Artificial Sequence
  Description of Artificial Sequence: Synthetic oligonucleotide
  Description of Combined DNA/RNA Molecule: Synthetic oligonucleotide
tctcgattacgctccgcacccagcacatctccaccaccgcaaactc

SEQ ID NO: 2839 - DNA, 53 bp, Artificial Sequence
  Description of Artificial Sequence: Synthetic oligonucleotide
aacctctctgagcaccaggtaaccatctggtgtgtgtagcttagacatggcca

SEQ ID NO: 2840 - DNA, 27 bp, Artificial Sequence
  Description of Artificial Sequence: Synthetic probe
ttcaccgcaaacctctctgagcaccag

SEQ ID NO: 2841 - DNA, 19 bp, Artificial Sequence
  Description of Artificial Sequence: Synthetic primer
tctcgattacgctccgcac

SEQ ID NO: 2842 - DNA, 22 bp, Artificial Sequence
  Description of Artificial Sequence: Synthetic primer
tggccatgtctaagctacacac

SEQ ID NO: 2843 - DNA, 53 bp, Artificial Sequence
  Description of Artificial Sequence: Synthetic primer
  Description of Combined DNA/RNA Molecule: Synthetic primer
tggccatgtctaagctacacacgaccaccttcttctctttgacctgttggttt

SEQ ID NO: 2844 - DNA, 44 bp, Artificial Sequence
  Description of Artificial Sequence: Synthetic primer
  Description of Combined DNA/RNA Molecule: Synthetic primer
acgacgacgacgaagcacccaccaaagtagaagccttcaugtta

SEQ ID NO: 2845 - DNA, 48 bp, Artificial Sequence
  Description of Artificial Sequence: Synthetic primer
  Description of Combined DNA/RNA Molecule: Synthetic primer
acgacgacgacgaaccaccaaagtagaagccttcatgttggtacttga

SEQ ID NO: 2846 - DNA, 55 bp, Artificial Sequence
  Description of Artificial Sequence: Synthetic primer
  Description of Combined DNA/RNA Molecule: Synthetic primer
acgacgacgacttgacgaacataatctgaacattgccattgagtggtggcaggga

SEQ ID NO: 2847 - DNA, 51 bp, Artificial Sequence
  Description of Artificial Sequence: Synthetic oligonucleotide
  Description of Combined DNA/RNA Molecule: Synthetic oligonucleotide
tcacagagacttgccgatcacccccttggcatgcacattgacaccagcatt

SEQ ID NO: 2848 - DNA, 47 bp, Artificial Sequence
  Description of Artificial Sequence: Synthetic oligonucleotide
gcaccagcagcaatgagcagggctggtgtgtagcttagacatggcca

SEQ ID NO: 2849 - DNA, 26 bp, Artificial Sequence
  Description of Artificial Sequence: Synthetic probe
aagacaccagcaccagcagcaatgag

SEQ ID NO: 2850 - DNA, 21 bp, Artificial Sequence
  Description of Artificial Sequence: Synthetic primer
tcacagagacttgccgatcac

SEQ ID NO: 2851 - DNA, 22 bp, Artificial Sequence
  Description of Artificial Sequence: Synthetic primer
tggccatgtctaagctacacac

SEQ ID NO: 2852 - DNA, 49 bp, Artificial Sequence
  Description of Artificial Sequence: Synthetic primer
  Description of Combined DNA/RNA Molecule: Synthetic primer
tggccatgtctaagctacacacggacattgcagccctgctcactgctga

SEQ ID NO: 2853 - DNA, 40 bp, Artificial Sequence
  Description of Artificial Sequence: Synthetic primer
  Description of Combined DNA/RNA Molecule: Synthetic primer
acgacgacgacgaacctctcacctcatgcccaccagccat

SEQ ID NO: 2854 - DNA, 40 bp, Artificial Sequence
  Description of Artificial Sequence: Synthetic primer
  Description of Combined DNA/RNA Molecule: Synthetic primer
acgacgacgacgaaccctgccctctcacctcatgcccact

SEQ ID NO: 2855 - DNA, 55 bp, Artificial Sequence
  Description of Artificial Sequence: Synthetic primer
  Description of Combined DNA/RNA Molecule: Synthetic primer
acgacgacgacttgacgaacataatcagtgctgatggacagaaggatggaugggt

SEQ ID NO: 2856 - DNA, 51 bp, Artificial Sequence
  Description of Artificial Sequence: Synthetic oligonucleotide
  Description of Combined DNA/RNA Molecule: Synthetic oligonucleotide
tcacagagacttgccgatcaccacagcatccaggtcttcatcaacaccagt

SEQ ID NO: 2857 - DNA, 56 bp, Artificial Sequence
  Description of Artificial Sequence: Synthetic oligonucleotide
ccaaccctgaaggtacatccctcactcaggtttggtgtgtagcttagacatggcca

SEQ ID NO: 2858 - DNA, 31 bp, Artificial Sequence
  Description of Artificial Sequence: Synthetic probe
aaatcaacaccaaccctgaaggtacatccct

SEQ ID NO: 2859 - DNA, 21 bp, Artificial Sequence
  Description of Artificial Sequence: Synthetic primer
tcacagagacttgccgatcac

SEQ ID NO: 2860 - DNA, 22 bp, Artificial Sequence
  Description of Artificial Sequence: Synthetic primer
tggccatgtctaagctacacac

SEQ ID NO: 2861 - DNA, 52 bp, Artificial Sequence
  Description of Artificial Sequence: Synthetic primer
  Description of Combined DNA/RNA Molecule: Synthetic primer
tggccatgtctaagctacacacgaaggatggatgggcaaacctgaatgagga

SEQ ID NO: 2862 - DNA, 38 bp, Artificial Sequence
  Description of Artificial Sequence: Synthetic primer
  Description of Combined DNA/RNA Molecule: Synthetic primer
acgacgacgacgaagcaggaggcaggtggtccagggcg

SEQ ID NO: 2863 - DNA, 40 bp, Artificial Sequence
  Description of Artificial Sequence: Synthetic primer
  Description of Combined DNA/RNA Molecule: Synthetic primer
acgacgacgacgaacaggcaatcaggccagcaggaggcaa

SEQ ID NO: 2864 - DNA, 56 bp, Artificial Sequence
  Description of Artificial Sequence: Synthetic primer
  Description of Combined DNA/RNA Molecule: Synthetic primer
acgacgacgacttgacgaacataatcctttgcattgagatgaatgggtgccctgta

SEQ ID NO: 2865 - DNA, 48 bp, Artificial Sequence
  Description of Artificial Sequence: Synthetic oligonucleotide
  Description of Combined DNA/RNA Molecule: Synthetic oligonucleotide
ttcgtccctgcacgctaaccagacaatggcacagaggagtacagaatt

SEQ ID NO: 2866 - DNA, 55 bp, Artificial Sequence
  Description of Artificial Sequence: Synthetic oligonucleotide
gaacctgggactaaatttggcattgcctttgcagggttccatcaccgttaggcca

SEQ ID NO: 2867 - DNA, 35 bp, Artificial Sequence
  Description of Artificial Sequence: Synthetic probe
ttgagtacagaacctgggactaaatttggcattgc

SEQ ID NO: 2868 - DNA, 19 bp, Artificial Sequence
  Description of Artificial Sequence: Synthetic primer
ttcgtccctgcacgctaac

SEQ ID NO: 2869 - DNA, 20 bp, Artificial Sequence
  Description of Artificial Sequence: Synthetic primer
tggcctaacggtgatggaac

SEQ ID NO: 2870 - DNA, 50 bp, Artificial Sequence
  Description of Artificial Sequence: Synthetic primer
  Description of Combined DNA/RNA Molecule: Synthetic primer
tggcctaacggtgatggaacgcattgagatgaatgggtgccctatgccta

SEQ ID NO: 2871 - DNA, 39 bp, Artificial Sequence
  Description of Artificial Sequence: Synthetic primer
  Description of Combined DNA/RNA Molecule: Synthetic primer
acgacgacgacgaagtggcaaccaagtggcaccagcaga

SEQ ID NO: 2872 - DNA, 39 bp, Artificial Sequence
  Description of Artificial Sequence: Synthetic primer
  Description of Combined DNA/RNA Molecule: Synthetic primer
acgacgacgacgaagcaaccaagtggcaccagcaggacc

SEQ ID NO: 2873 - DNA, 63 bp, Artificial Sequence
  Description of Artificial Sequence: Synthetic primer
  Description of Combined DNA/RNA Molecule: Synthetic primer
acgacgacgacttgacgaacataattgttttacaatgccttgaagtataaatgtttcccctgg

SEQ ID NO: 2874 - DNA, 46 bp, Artificial Sequence
  Description of Artificial Sequence: Synthetic oligonucleotide
  Description of Combined DNA/RNA Molecule: Synthetic oligonucleotide
tgatgctggcaaaccctagaacgccaggctgggctgatacagacgt

SEQ ID NO: 2875 - DNA, 46 bp, Artificial Sequence
  Description of Artificial Sequence: Synthetic oligonucleotide
gacacaggaggcagcaggcactcagggttccatcaccgttaggcca

SEQ ID NO: 2876 - DNA, 28 bp, Artificial Sequence
  Description of Artificial Sequence: Synthetic probe
tttgatacagacacaggaggcagcaggc

SEQ ID NO: 2877 - DNA, 22 bp, Artificial Sequence
  Description of Artificial Sequence: Synthetic primer
tgatgctggcaaaccctagaac

SEQ ID NO: 2878 - DNA, 20 bp, Artificial Sequence
  Description of Artificial Sequence: Synthetic primer
tggcctaacggtgatggaac

SEQ ID NO: 2879 - DNA, 57 bp, Artificial Sequence
  Description of Artificial Sequence: Synthetic primer
  Description of Combined DNA/RNA Molecule: Synthetic primer
tggcctaacggtgatggaacttacaatgccttgaagtataaatgtttcccttgagta

SEQ ID NO: 2880 - DNA, 37 bp, Artificial Sequence
  Description of Artificial Sequence: Synthetic primer
  Description of Combined DNA/RNA Molecule: Synthetic primer
acgacgacgacgaagccagctgtggtcaggcaggccg

SEQ ID NO: 2881 - DNA, 38 bp, Artificial Sequence
  Description of Artificial Sequence: Synthetic primer
  Description of Combined DNA/RNA Molecule: Synthetic primer
acgacgacgacgaaaccagggccagctgtggtcaggcg

SEQ ID NO: 2882 - DNA, 53 bp, Artificial Sequence
  Description of Artificial Sequence: Synthetic primer
  Description of Combined DNA/RNA Molecule: Synthetic primer
acgacgacgacttgacgaacataatggtgcagcttgagacctggtgacatgcc

SEQ ID NO: 2883 - DNA, 52 bp, Artificial Sequence
  Description of Artificial Sequence: Synthetic oligonucleotide
  Description of Combined DNA/RNA Molecule: Synthetic oligonucleotide
tgatgctggcaaaccctagaacgctattttctggcaagtgtggcgcagggtc

SEQ ID NO: 2884 - DNA, 40 bp, Artificial Sequence
  Description of Artificial Sequence: Synthetic oligonucleotide
gggctggacacccctgccaggttccatcaccgttaggcca

SEQ ID NO: 2885 - DNA, 20 bp, Artificial Sequence
  Description of Artificial Sequence: Synthetic probe
tttggcgcagggctggacac

SEQ ID NO: 2886 - DNA, 22 bp, Artificial Sequence
  Description of Artificial Sequence: Synthetic primer
tgatgctggcaaaccctagaac

SEQ ID NO: 2887 - DNA, 20 bp, Artificial Sequence
  Description of Artificial Sequence: Synthetic primer
tggcctaacggtgatggaac

SEQ ID NO: 2888 - DNA, 47 bp, Artificial Sequence
  Description of Artificial Sequence: Synthetic primer
  Description of Combined DNA/RNA Molecule: Synthetic primer
tggcctaacggtgatggaacgcttgagacctggtgacctgttggcaa

SEQ ID NO: 2889 - DNA, 40 bp, Artificial Sequence
  Description of Artificial Sequence: Synthetic primer
  Description of Combined DNA/RNA Molecule: Synthetic primer
acgacgacgacgaaggcagaggcctgctttgatcactctg

SEQ ID NO: 2890 - DNA, 41 bp, Artificial Sequence
  Description of Artificial Sequence: Synthetic primer
  Description of Combined DNA/RNA Molecule: Synthetic primer
acgacgacgacgaaagaggcctgctttgatcactccagctt

SEQ ID NO: 2891 - DNA, 54 bp, Artificial Sequence
  Description of Artificial Sequence: Synthetic primer
  Description of Combined DNA/RNA Molecule: Synthetic primer
acgacgacgacttgacgaacataatgctccaggtgtgagatgatgctgggggta

SEQ ID NO: 2892 - DNA, 54 bp, Artificial Sequence
  Description of Artificial Sequence: Synthetic oligonucleotide
  Description of Combined DNA/RNA Molecule: Synthetic oligonucleotide
ttttcggcatccgcttccatgtcttcaccagatagattagctggaatcaccaat

SEQ ID NO: 2893 - DNA, 51 bp, Artificial Sequence
  Description of Artificial Sequence: Synthetic oligonucleotide
ccagccctagcttggagttccattccacagtggttaacagaggacaggcca

SEQ ID NO: 2894 - DNA, 30 bp, Artificial Sequence
  Description of Artificial Sequence: Synthetic probe
aaggaatcaccagccctagcttggagttcc

SEQ ID NO: 2895 - DNA, 19 bp, Artificial Sequence
  Description of Artificial Sequence: Synthetic primer
ttttcggcatccgcttcca

SEQ ID NO: 2896 - DNA, 21 bp, Artificial Sequence
  Description of Artificial Sequence: Synthetic primer
tggcctgtcctctgttaacca

SEQ ID NO: 2897 - DNA, 47 bp, Artificial Sequence
  Description of Artificial Sequence: Synthetic primer
  Description of Combined DNA/RNA Molecule: Synthetic primer
tggcctgtcctctgttaaccaggtgaggagggagggtactttgtggg

SEQ ID NO: 2898 - DNA, 53 bp, Artificial Sequence
  Description of Artificial Sequence: Synthetic primer
  Description of Combined DNA/RNA Molecule: Synthetic primer
acgacgacgacgaactctttcaaatattcctaggaatagtcagcagcagcagt

SEQ ID NO: 2899 - DNA, 54 bp, Artificial Sequence
  Description of Artificial Sequence: Synthetic primer
  Description of Combined DNA/RNA Molecule: Synthetic primer
acgacgacgacgaatttcctctttcaaatattcctaggaatagtcagcagcagt

SEQ ID NO: 2900 - DNA, 56 bp, Artificial Sequence
  Description of Artificial Sequence: Synthetic primer
  Description of Combined DNA/RNA Molecule: Synthetic primer
acgacgacgacttgacgaacataatttagtcaacctgatgccctgaccctggtgct

SEQ ID NO: 2901 - DNA, 43 bp, Artificial Sequence
  Description of Artificial Sequence: Synthetic oligonucleotide
  Description of Combined DNA/RNA Molecule: Synthetic oligonucleotide
tccgggtatacactgtcccagcagccacagcagccgcagattc

SEQ ID NO: 2902 - DNA, 61 bp, Artificial Sequence
  Description of Artificial Sequence: Synthetic oligonucleotide
gatctagagcaaacatcctgtgctttggagttagaaccagtggttaacagaggacaggcca

SEQ ID NO: 2903 - DNA, 30 bp, Artificial Sequence
  Description of Artificial Sequence: Synthetic probe
ttagccgcagatctagagcaaacatcctgt

SEQ ID NO: 2904 - DNA, 20 bp, Artificial Sequence
  Description of Artificial Sequence: Synthetic primer
tccgggtatacactgtccca

SEQ ID NO: 2905 - DNA, 21 bp, Artificial Sequence
  Description of Artificial Sequence: Synthetic primer
tggcctgtcctctgttaacca

SEQ ID NO: 2906 - DNA, 47 bp, Artificial Sequence
  Description of Artificial Sequence: Synthetic primer
  Description of Combined DNA/RNA Molecule: Synthetic primer
tggcctgtcctctgttaaccatcaacctgatgccctgaccttgtgct

SEQ ID NO: 2907 - DNA, 39 bp, Artificial Sequence
  Description of Artificial Sequence: Synthetic primer
  Description of Combined DNA/RNA Molecule: Synthetic primer
acgacgacgacgaactcttcaggccccacaggcacctct

SEQ ID NO: 2908 - DNA, 36 bp, Artificial Sequence
  Description of Artificial Sequence: Synthetic primer
  Description of Combined DNA/RNA Molecule: Synthetic primer
acgacgacgacgaacaggccccacaggcaccuccta

SEQ ID NO: 2909 - DNA, 56 bp, Artificial Sequence
  Description of Artificial Sequence: Synthetic primer
  Description of Combined DNA/RNA Molecule: Synthetic primer
acgacgacgacttgacgaacataatgagaaagatggctaggctgtgcacacatgcc

SEQ ID NO: 2910 - DNA, 42 bp, Artificial Sequence
  Description of Artificial Sequence: Synthetic oligonucleotide
  Description of Combined DNA/RNA Molecule: Synthetic oligonucleotide
tgcgactctattcacgtccaatcctgggtgggcctcacagtt

SEQ ID NO: 2911 - DNA, 43 bp, Artificial Sequence
  Description of Artificial Sequence: Synthetic oligonucleotide
cagcccctccaaccctgcccagttgctatttggtgtaccgcca

SEQ ID NO: 2912 - DNA, 23 bp, Artificial Sequence
  Description of Artificial Sequence: Synthetic probe
aaggcctcacagcccctccaacc

SEQ ID NO: 2913 - DNA, 21 bp, Artificial Sequence
  Description of Artificial Sequence: Synthetic primer
tgcgactctattcacgtccaa

SEQ ID NO: 2914 - DNA, 21 bp, Artificial Sequence
  Description of Artificial Sequence: Synthetic primer
tggcggtacaccaaatagcaa

SEQ ID NO: 2915 - DNA, 50 bp, Artificial Sequence
  Description of Artificial Sequence: Synthetic primer
  Description of Combined DNA/RNA Molecule: Synthetic primer
tggcggtacaccaaatagcaaaagatggctaggctgtgcacacgtgctga

SEQ ID NO: 2916 - DNA, 42 bp, Artificial Sequence
  Description of Artificial Sequence: Synthetic primer
  Description of Combined DNA/RNA Molecule: Synthetic primer
acgacgacgacgaacacatttgtgggctggtagcccagaatg

SEQ ID NO: 2917 - DNA, 43 bp, Artificial Sequence
  Description of Artificial Sequence: Synthetic primer
  Description of Combined DNA/RNA Molecule: Synthetic primer
acgacgacgacgaacatttgtgggctggtagcccagaauacac

SEQ ID NO: 2918 - DNA, 53 bp, Artificial Sequence
  Description of Artificial Sequence: Synthetic primer
  Description of Combined DNA/RNA Molecule: Synthetic primer
acgacgacgacttgacgaacataatagcagctctgctactgtgtcctccagtc

SEQ ID NO: 2919 - DNA, 47 bp, Artificial Sequence
  Description of Artificial Sequence: Synthetic oligonucleotide
  Description of Combined DNA/RNA Molecule: Synthetic oligonucleotide
ttgtgcagagcgaacaacaaccagaggccttcacagccagcaugccc

SEQ ID NO: 2920 - DNA, 49 bp, Artificial Sequence
  Description of Artificial Sequence: Synthetic oligonucleotide
tgcttcacacaggaacacagccacctccttgctatttggtgtaccgcca

SEQ ID NO: 2921 - DNA, 28 bp, Artificial Sequence
  Description of Artificial Sequence: Synthetic probe
ttgccagcatgcttcacacaggaacaca

SEQ ID NO: 2922 - DNA, 20 bp, Artificial Sequence
  Description of Artificial Sequence: Synthetic primer
ttgtgcagagcgaacaacaa

SEQ ID NO: 2923 - DNA, 21 bp, Artificial Sequence
  Description of Artificial Sequence: Synthetic primer
tggcggtacaccaaatagcaa

SEQ ID NO: 2924 - DNA, 51 bp, Artificial Sequence
  Description of Artificial Sequence: Synthetic primer
  Description of Combined DNA/RNA Molecule: Synthetic primer
tggcggtacaccaaatagcaactactgtgtcctccagttgggagatggcta

SEQ ID NO: 2925 - DNA, 39 bp, Artificial Sequence
  Description of Artificial Sequence: Synthetic primer
  Description of Combined DNA/RNA Molecule: Synthetic primer
acgacgacgacgaaagtgcccctctaggagcccagaggg

SEQ ID NO: 2926 - DNA, 40 bp, Artificial Sequence
  Description of Artificial Sequence: Synthetic primer
  Description of Combined DNA/RNA Molecule: Synthetic primer
acgacgacgacgaacccctctaggagcccagaggaccacg

SEQ ID NO: 2927 - DNA, 52 bp, Artificial Sequence
  Description of Artificial Sequence: Synthetic primer
  Description of Combined DNA/RNA Molecule: Synthetic primer
acgacgacgacttgacgaacataatgtactctgtgatgcccctgccaggtcc

SEQ ID NO: 2928 - DNA, 47 bp, Artificial Sequence
  Description of Artificial Sequence: Synthetic oligonucleotide
  Description of Combined DNA/RNA Molecule: Synthetic oligonucleotide
tccaaacgattaggagcgtcaaacagctctgtggcaggcgcaggttg

SEQ ID NO: 2929 - DNA, 48 bp, Artificial Sequence
  Description of Artificial Sequence: Synthetic oligonucleotide
ggtcatgtctcacaggagaggcacaggttggacagaggtatacgccca

SEQ ID NO: 2930 - DNA, 27 bp, Artificial Sequence
  Description of Artificial Sequence: Synthetic probe
ttaggcgcaggtcatgtctcacaggag

SEQ ID NO: 2931 - DNA, 22 bp, Artificial Sequence
  Description of Artificial Sequence: Synthetic primer
tccaaacgattaggagcgtcaa

SEQ ID NO: 2932 - DNA, 21 bp, Artificial Sequence
  Description of Artificial Sequence: Synthetic primer
tgggcgtatacctctgtccaa

SEQ ID NO: 2933 - DNA, 47 bp, Artificial Sequence
  Description of Artificial Sequence: Synthetic primer
  Description of Combined DNA/RNA Molecule: Synthetic primer
tgggcgtatacctctgtccaaccaggtctgagctggacctatgccct

SEQ ID NO: 2934 - DNA, 58 bp, Artificial Sequence
  Description of Artificial Sequence: Synthetic primer
  Description of Combined DNA/RNA Molecule: Synthetic primer
acgacgacgacgaactttttatttaataaaaaagttagctatttcacttaacaccacc

SEQ ID NO: 2935 - DNA, 52 bp, Artificial Sequence
  Description of Artificial Sequence: Synthetic primer
  Description of Combined DNA/RNA Molecule: Synthetic primer
acgacgacgacttgacgaacataatctgtgtgctgctgcttggcttcuacta

SEQ ID NO: 2936 - DNA, 64 bp, Artificial Sequence
  Description of Artificial Sequence: Synthetic oligonucleotide
  Description of Combined DNA/RNA Molecule: Synthetic oligonucleotide
tccaaacgattaggagcgtcaacacttttatttcattttcattccaataatgctcaacaacctt

SEQ ID NO: 2937 - DNA, 39 bp, Artificial Sequence
  Description of Artificial Sequence: Synthetic oligonucleotide
acccccagccctgcacccttggacagaggtatacgccca

SEQ ID NO: 2938 - DNA, 24 bp, Artificial Sequence
  Description of Artificial Sequence: Synthetic probe
aactcaacaacccccagccctgca

SEQ ID NO: 2939 - DNA, 22 bp, Artificial Sequence
  Description of Artificial Sequence: Synthetic primer
tccaaacgattaggagcgtcaa

SEQ ID NO: 2940 - DNA, 21 bp, Artificial Sequence
  Description of Artificial Sequence: Synthetic primer
tgggcgtatacctctgtccaa

SEQ ID NO: 2941 - DNA, 48 bp, Artificial Sequence
  Description of Artificial Sequence: Synthetic primer
  Description of Combined DNA/RNA Molecule: Synthetic primer
tgggcgtatacctctgtccaactgctgcttggcttctactgttgcaga

SEQ ID NO: 2942 - DNA, 47 bp, Artificial Sequence
  Description of Artificial Sequence: Synthetic primer
  Description of Combined DNA/RNA Molecule: Synthetic primer
acgacgacgacgaactcacacctacatactcagtcaccagcagaact

SEQ ID NO: 2943 - DNA, 46 bp, Artificial Sequence
  Description of Artificial Sequence: Synthetic primer
  Description of Combined DNA/RNA Molecule: Synthetic primer
acgacgacgacgaacctacatactcagtcaccagcagaaccctctt

SEQ ID NO: 2944 - DNA, 56 bp, Artificial Sequence
  Description of Artificial Sequence: Synthetic primer
  Description of Combined DNA/RNA Molecule: Synthetic primer
acgacgacgacttgacgaacataatgactggaatgcagaggtgtacatggcuaagg

SEQ ID NO: 2945 - DNA, 46 bp, Artificial Sequence
  Description of Artificial Sequence: Synthetic oligonucleotide
  Description of Combined DNA/RNA Molecule: Synthetic oligonucleotide
ttgcagcgggtcacaacaacacatcaaggccctacaggacaucagc

SEQ ID NO: 2946 - DNA, 56 bp, Artificial Sequence
  Description of Artificial Sequence: Synthetic oligonucleotide
tcaatacacacacatactttgtgtcccaggtagctttggacagaggtatacgccca

SEQ ID NO: 2947 - DNA, 36 bp, Artificial Sequence
  Description of Artificial Sequence: Synthetic probe
cccaggacatcaatacacacacatactttgtgtccc

SEQ ID NO: 2948 - DNA, 19 bp, Artificial Sequence
  Description of Artificial Sequence: Synthetic primer
ttgcagcgggtcacaacaa

SEQ ID NO: 2949 - DNA, 21 bp, Artificial Sequence
  Description of Artificial Sequence: Synthetic primer
tgggcgtatacctctgtccaa

SEQ ID NO: 2950 - DNA, 55 bp, Artificial Sequence
  Description of Artificial Sequence: Synthetic primer
  Description of Combined DNA/RNA Molecule: Synthetic primer
tgggcgtatacctctgtccaagaatgcagaggtgtacatggctaagaggtgagcc

SEQ ID NO: 2951 - DNA, 44 bp, Artificial Sequence
  Description of Artificial Sequence: Synthetic primer
  Description of Combined DNA/RNA Molecule: Synthetic primer
acgacgacgacgaacacaaactccagagcaaggcacacaccttc

SEQ ID NO: 2952 - DNA, 44 bp, Artificial Sequence
  Description of Artificial Sequence: Synthetic primer
  Description of Combined DNA/RNA Molecule: Synthetic primer
acgacgacgacgaactccagagcaaggcacacacctttaaaggt

SEQ ID NO: 2953 - DNA, 48 bp, Artificial Sequence
  Description of Artificial Sequence: Synthetic primer
  Description of Combined DNA/RNA Molecule: Synthetic primer
acgacgacgacttgacgaacataatgtgcctctgtgcctgggcacagt

SEQ ID NO: 2954 - DNA, 47 bp, Artificial Sequence
  Description of Artificial Sequence: Synthetic oligonucleotide
  Description of Combined DNA/RNA Molecule: Synthetic oligonucleotide
tcgtcccggtcagtagtcaagcaggtccacagctctcccgcauccca

SEQ ID NO: 2955 - DNA, 47 bp, Artificial Sequence
  Description of Artificial Sequence: Synthetic oligonucleotide
tcctggcacccagttttccacacccagttgcccattttctgcaccca

SEQ ID NO: 2956 - DNA, 22 bp, Artificial Sequence
  Description of Artificial Sequence: Synthetic probe
aatcccgcatcctggcacccag

SEQ ID NO: 2957 - DNA, 20 bp, Artificial Sequence
  Description of Artificial Sequence: Synthetic primer
tcgtcccggtcagtagtcaa

SEQ ID NO: 2958 - DNA, 20 bp, Artificial Sequence
  Description of Artificial Sequence: Synthetic primer
tgggtgcagaaaatgggcaa

SEQ ID NO: 2959 - DNA, 45 bp, Artificial Sequence
  Description of Artificial Sequence: Synthetic primer
  Description of Combined DNA/RNA Molecule: Synthetic primer
tgggtgcagaaaatgggcaagctgtgaggacactgggtatggaag

SEQ ID NO: 2960 - DNA, 45 bp, Artificial Sequence
  Description of Artificial Sequence: Synthetic primer
  Description of Combined DNA/RNA Molecule: Synthetic primer
acgacgacgacgaagtgtgtccaggtgcaagatcatgtcagtgag

SEQ ID NO: 2961 - DNA, 47 bp, Artificial Sequence
  Description of Artificial Sequence: Synthetic primer
  Description of Combined DNA/RNA Molecule: Synthetic primer
acgacgacgacgaagtccaggtgcaagatcatgtcagtgaacctgga

SEQ ID NO: 2962 - DNA, 51 bp, Artificial Sequence
  Description of Artificial Sequence: Synthetic primer
  Description of Combined DNA/RNA Molecule: Synthetic primer
acgacgacgacttgacgaacataatcctctggccctggcttgatgcugcta

SEQ ID NO: 2963 - DNA, 44 bp, Artificial Sequence
  Description of Artificial Sequence: Synthetic oligonucleotide
  Description of Combined DNA/RNA Molecule: Synthetic oligonucleotide
ttcgtgcgtcgtgtagcaatgtccacagcatgcaggtcagcaga

SEQ ID NO: 2964 - DNA, 46 bp, Artificial Sequence
  Description of Artificial Sequence: Synthetic oligonucleotide
gcaagcagcagttccagcactcccagttgcccattttctgcaccca

SEQ ID NO: 2965 - DNA, 26 bp, Artificial Sequence
  Description of Artificial Sequence: Synthetic probe
aacaggtcagcaagcagcagttccag

SEQ ID NO: 2966 - DNA, 19 bp, Artificial Sequence
  Description of Artificial Sequence: Synthetic primer
ttcgtgcgtcgtgtagcaa

SEQ ID NO: 2967 - DNA, 20 bp, Artificial Sequence
  Description of Artificial Sequence: Synthetic primer
tgggtgcagaaaatgggcaa

SEQ ID NO: 2968 - DNA, 46 bp, Artificial Sequence
  Description of Artificial Sequence: Synthetic primer
  Description of Combined DNA/RNA Molecule: Synthetic primer
tgggtgcagaaaatgggcaatggcttgatgctgctgggaatgctga

SEQ ID NO: 2969 - DNA, 39 bp, Artificial Sequence
  Description of Artificial Sequence: Synthetic primer
  Description of Combined DNA/RNA Molecule: Synthetic primer
acgacgacgacgaacagggcaggatctcaccccagggag

SEQ ID NO: 2970 - DNA, 40 bp, Artificial Sequence
  Description of Artificial Sequence: Synthetic primer
  Description of Combined DNA/RNA Molecule: Synthetic primer
acgacgacgacgaagggtcagggcaggatctcaccatccc

SEQ ID NO: 2971 - DNA, 51 bp, Artificial Sequence
  Description of Artificial Sequence: Synthetic primer
  Description of Combined DNA/RNA Molecule: Synthetic primer
acgacgacgacttgacgaacataatgcagccacttgtgggctctccatccc

SEQ ID NO: 2972 - DNA, 42 bp, Artificial Sequence
  Description of Artificial Sequence: Synthetic oligonucleotide
  Description of Combined DNA/RNA Molecule: Synthetic oligonucleotide
ttcgtgcgtcgtgtagcaagagggcacaggtgcaacaugaaa

SEQ ID NO: 2973 - DNA, 46 bp, Artificial Sequence
  Description of Artificial Sequence: Synthetic oligonucleotide
tgaggaccacatcctgaggagggaggttgcccattttctgcaccca

SEQ ID NO: 2974 - DNA, 30 bp, Artificial Sequence
  Description of Artificial Sequence: Synthetic probe
tttgcaacatgaggaccacatcctgaggag

SEQ ID NO: 2975 - DNA, 19 bp, Artificial Sequence
  Description of Artificial Sequence: Synthetic primer
ttcgtgcgtcgtgtagcaa

SEQ ID NO: 2976 - DNA, 20 bp, Artificial Sequence
  Description of Artificial Sequence: Synthetic primer
tgggtgcagaaaatgggcaa

SEQ ID NO: 2977 - DNA, 44 bp, Artificial Sequence
  Description of Artificial Sequence: Synthetic primer
  Description of Combined DNA/RNA Molecule: Synthetic primer
tgggtgcagaaaatgggcaactccaggaccctggcccctgccct

SEQ ID NO: 2978 - DNA, 40 bp, Artificial Sequence
  Description of Artificial Sequence: Synthetic primer
  Description of Combined DNA/RNA Molecule: Synthetic primer
acgacgacgacgaactgcagggtcacaggaaggcaaaggt

SEQ ID NO: 2979 - DNA, 40 bp, Artificial Sequence
  Description of Artificial Sequence: Synthetic primer
  Description of Combined DNA/RNA Molecule: Synthetic primer
acgacgacgacgaagctgctgcagggtcacaggaaggcag

SEQ ID NO: 2980 - DNA, 48 bp, Artificial Sequence
  Description of Artificial Sequence: Synthetic primer
  Description of Combined DNA/RNA Molecule: Synthetic primer
acgacgacgacttgacgaacataatggctgtggtggcagtgccatccc

SEQ ID NO: 2981 - DNA, 48 bp, Artificial Sequence
  Description of Artificial Sequence: Synthetic oligonucleotide
  Description of Combined DNA/RNA Molecule: Synthetic oligonucleotide
tcggagagaggagccctaaacgcagttccagacacagaggacaaggaa

SEQ ID NO: 2982 - DNA, 38 bp, Artificial Sequence
  Description of Artificial Sequence: Synthetic oligonucleotide
aggagcagctgcccacagcgtttcctctgtgcggacca

SEQ ID NO: 2983 - DNA, 22 bp, Artificial Sequence
  Description of Artificial Sequence: Synthetic probe
aagaggacaaggagcagctgcc

SEQ ID NO: 2984 - DNA, 21 bp, Artificial Sequence
  Description of Artificial Sequence: Synthetic primer
tcggagagaggagccctaaac

SEQ ID NO: 2985 - DNA, 19 bp, Artificial Sequence
  Description of Artificial Sequence: Synthetic primer
tggtccgcacagaggaaac

SEQ ID NO: 2986 - DNA, 44 bp, Artificial Sequence
  Description of Artificial Sequence: Synthetic primer
  Description of Combined DNA/RNA Molecule: Synthetic primer
tggtccgcacagaggaaacgcagtgccatcctgggctatgggcg

SEQ ID NO: 2987 - DNA, 44 bp, Artificial Sequence
  Description of Artificial Sequence: Synthetic primer
  Description of Combined DNA/RNA Molecule: Synthetic primer
acgacgacgacgaagtgtgtcagaggatctatctgagcaggctt

SEQ ID NO: 2988 - DNA, 43 bp, Artificial Sequence
  Description of Artificial Sequence: Synthetic primer
  Description of Combined DNA/RNA Molecule: Synthetic primer
acgacgacgacgaagtcagaggatctatctgagcaggcucctt

SEQ ID NO: 2989 - DNA, 51 bp, Artificial Sequence
  Description of Artificial Sequence: Synthetic primer
  Description of Combined DNA/RNA Molecule: Synthetic primer
acgacgacgacttgacgaacataatgagtcctgtggagctggtggcuctct

SEQ ID NO: 2990 - DNA, 53 bp, Artificial Sequence
  Description of Artificial Sequence: Synthetic oligonucleotide
  Description of Combined DNA/RNA Molecule: Synthetic oligonucleotide
tggcgtaaggacactctgaaaccatgtcagcactttcccttcctcccagcatc

SEQ ID NO: 2991 - DNA, 47 bp, Artificial Sequence
  Description of Artificial Sequence: Synthetic oligonucleotide
gcactcagtcacccagctctaggcactggtttcctctgtgcggacca

SEQ ID NO: 2992 - DNA, 25 bp, Artificial Sequence
  Description of Artificial Sequence: Synthetic probe
aacctcccagcactcagtcacccag

SEQ ID NO: 2993 - DNA, 22 bp, Artificial Sequence
  Description of Artificial Sequence: Synthetic primer
tggcgtaaggacactctgaaac

SEQ ID NO: 2994 - DNA, 19 bp, Artificial Sequence
  Description of Artificial Sequence: Synthetic primer
tggtccgcacagaggaaac

SEQ ID NO: 2995 - DNA, 44 bp, Artificial Sequence
  Description of Artificial Sequence: Synthetic primer
  Description of Combined DNA/RNA Molecule: Synthetic primer
tggtccgcacagaggaaacggagctggtggctctccaatgcctg

SEQ ID NO: 2996 - DNA, 44 bp, Artificial Sequence
  Description of Artificial Sequence: Synthetic primer
  Description of Combined DNA/RNA Molecule: Synthetic primer
acgacgacgacgaaggcagggagccacatttaggtttcaggcaa

SEQ ID NO: 2997 - DNA, 38 bp, Artificial Sequence
  Description of Artificial Sequence: Synthetic primer
  Description of Combined DNA/RNA Molecule: Synthetic primer
acgacgacgacgaaccacaggcagggagccacauttaa

SEQ ID NO: 2998 - DNA, 51 bp, Artificial Sequence
  Description of Artificial Sequence: Synthetic primer
  Description of Combined DNA/RNA Molecule: Synthetic primer
acgacgacgacttgacgaacataatgagttctggctttgggcctgcagccc

SEQ ID NO: 2999 - DNA, 45 bp, Artificial Sequence
  Description of Artificial Sequence: Synthetic oligonucleotide
  Description of Combined DNA/RNA Molecule: Synthetic oligonucleotide
tcacgcacgtagggtctaaacggcaggcagacagggaacagcctg

SEQ ID NO: 3000 - DNA, 46 bp, Artificial Sequence
  Description of Artificial Sequence: Synthetic oligonucleotide
gcctttggaggatgcctcacttgggcgttgtccggctgtggttaca

SEQ ID NO: 3001 - DNA, 25 bp, Artificial Sequence
  Description of Artificial Sequence: Synthetic probe
ttgggaacagcccaagtgaggcatc

SEQ ID NO: 3002 - DNA, 21 bp, Artificial Sequence
  Description of Artificial Sequence: Synthetic primer
tcacgcacgtagggtctaaac

SEQ ID NO: 3003 - DNA, 20 bp, Artificial Sequence
  Description of Artificial Sequence: Synthetic primer
tgtaaccacagccggacaac

SEQ ID NO: 3004 - DNA, 45 bp, Artificial Sequence
  Description of Artificial Sequence: Synthetic primer
  Description of Combined DNA/RNA Molecule: Synthetic primer
tgtaaccacagccggacaacgctttgggcctgcagcctctggaga

SEQ ID NO: 3005 - DNA, 48 bp, Artificial Sequence; identical to SEQ ID NO: 776
  Description of Artificial Sequence: Synthetic primer
  Description of Combined DNA/RNA Molecule: Synthetic primer

SEQ ID NO: 3006 - DNA, 47 bp, Artificial Sequence; identical to SEQ ID NO: 777
  Description of Artificial Sequence: Synthetic primer
  Description of Combined DNA/RNA Molecule: Synthetic primer

SEQ ID NO: 3007 - DNA, 49 bp, Artificial Sequence; identical to SEQ ID NO: 778
  Description of Artificial Sequence: Synthetic primer
  Description of Combined DNA/RNA Molecule: Synthetic primer

SEQ ID NO: 3008 - DNA, 48 bp, Artificial Sequence; identical to SEQ ID NO: 779
  Description of Artificial Sequence: Synthetic oligonucleotide
  Description of Combined DNA/RNA Molecule: Synthetic oligonucleotide

SEQ ID NO: 3009 - DNA, 49 bp, Artificial Sequence; identical to SEQ ID NO: 780
  Description of Artificial Sequence: Synthetic oligonucleotide

SEQ ID NO: 3010 - DNA, 29 bp, Artificial Sequence
  Description of Artificial Sequence: Synthetic probe
aatctgacagacagacacagcacacttgg

SEQ ID NO: 3011 - DNA, 20 bp, Artificial Sequence
  Description of Artificial Sequence: Synthetic primer
tcccttagagagaacgccca

SEQ ID NO: 3012 - DNA, 22 bp, Artificial Sequence
  Description of Artificial Sequence: Synthetic primer
taagaacactcgtacgtcacca

SEQ ID NO: 3013 - DNA, 49 bp, Artificial Sequence; identical to SEQ ID NO: 784
  Description of Artificial Sequence: Synthetic primer
  Description of Combined DNA/RNA Molecule: Synthetic primer

SEQ ID NO: 3014 - DNA, 25 bp, Artificial Sequence
  Description of Artificial Sequence: Synthetic primer
  Description of Combined DNA/RNA Molecule: Synthetic primer
acgacgacgacttgacgaacataac

SEQ ID NO: 3015 - DNA, 42 bp, Artificial Sequence; identical to SEQ ID NO: 786
  Description of Artificial Sequence: Synthetic primer
  Description of Combined DNA/RNA Molecule: Synthetic primer

SEQ ID NO: 3016 - DNA, 46 bp, Artificial Sequence; identical to SEQ ID NO: 787
  Description of Artificial Sequence: Synthetic primer
  Description of Combined DNA/RNA Molecule: Synthetic primer

SEQ ID NO: 3017 - DNA, 53 bp, Artificial Sequence; identical to SEQ ID NO: 788
  Description of Artificial Sequence: Synthetic primer
  Description of Combined DNA/RNA Molecule: Synthetic primer

SEQ ID NO: 3018 - DNA, 51 bp, Artificial Sequence; identical to SEQ ID NO: 789
  Description of Artificial Sequence: Synthetic oligonucleotide
  Description of Combined DNA/RNA Molecule: Synthetic oligonucleotide

SEQ ID NO: 3019 - DNA, 54 bp, Artificial Sequence; identical to SEQ ID NO: 790
  Description of Artificial Sequence: Synthetic oligonucleotide

SEQ ID NO: 3020 - DNA, 22 bp, Artificial Sequence
  Description of Artificial Sequence: Synthetic probe
ttcaggccactgtggcccatca

SEQ ID NO: 3021 - DNA, 21 bp, Artificial Sequence
  Description of Artificial Sequence: Synthetic primer
tctcataccagacgcggtaac

SEQ ID NO: 3022 - DNA, 19 bp, Artificial Sequence
  Description of Artificial Sequence: Synthetic primer
taagcacagcgacacgaac

SEQ ID NO: 3023 - DNA, 54 bp, Artificial Sequence; identical to SEQ ID NO: 794
  Description of Artificial Sequence: Synthetic primer
  Description of Combined DNA/RNA Molecule: Synthetic primer

SEQ ID NO: 3024 - DNA, 40 bp, Artificial Sequence; identical to SEQ ID NO: 795
  Description of Artificial Sequence: Synthetic primer
  Description of Combined DNA/RNA Molecule: Synthetic primer

SEQ ID NO: 3025 - DNA, 40 bp, Artificial Sequence; identical to SEQ ID NO: 796
  Description of Artificial Sequence: Synthetic primer
  Description of Combined DNA/RNA Molecule: Synthetic primer

SEQ ID NO: 3026 - DNA, 49 bp, Artificial Sequence; identical to SEQ ID NO: 797
  Description of Artificial Sequence: Synthetic primer
  Description of Combined DNA/RNA Molecule: Synthetic primer

SEQ ID NO: 3027 - DNA, 47 bp, Artificial Sequence; identical to SEQ ID NO: 798
  Description of Artificial Sequence: Synthetic oligonucleotide
  Description of Combined DNA/RNA Molecule: Synthetic oligonucleotide

SEQ ID NO: 3028 - DNA, 40 bp, Artificial Sequence; identical to SEQ ID NO: 799
  Description of Artificial Sequence: Synthetic oligonucleotide

SEQ ID NO: 3029 - DNA, 22 bp, Artificial Sequence
  Description of Artificial Sequence: Synthetic probe
ttcaggccaggaacagggcctc

SEQ ID NO: 3030 - DNA, 19 bp, Artificial Sequence
  Description of Artificial Sequence: Synthetic primer
ttttcggcggcagctaaac

SEQ ID NO: 3031 - DNA, 19 bp, Artificial Sequence
  Description of Artificial Sequence: Synthetic primer
taagcacagcgacacgaac

SEQ ID NO: 3032 - DNA, 43 bp, Artificial Sequence; identical to SEQ ID NO: 803
  Description of Artificial Sequence: Synthetic primer
  Description of Combined DNA/RNA Molecule: Synthetic primer

SEQ ID NO: 3033 - DNA, 47 bp, Artificial Sequence; identical to SEQ ID NO: 804
  Description of Artificial Sequence: Synthetic primer
  Description of Combined DNA/RNA Molecule: Synthetic primer

SEQ ID NO: 3034 - DNA, 44 bp, Artificial Sequence; identical to SEQ ID NO: 805
  Description of Artificial Sequence: Synthetic primer
  Description of Combined DNA/RNA Molecule: Synthetic primer

SEQ ID NO: 3035 - DNA, 54 bp, Artificial Sequence; identical to SEQ ID NO: 806
  Description of Artificial Sequence: Synthetic primer
  Description of Combined DNA/RNA Molecule: Synthetic primer

SEQ ID NO: 3036 - DNA, 44 bp, Artificial Sequence; identical to SEQ ID NO: 807
  Description of Artificial Sequence: Synthetic oligonucleotide
  Description of Combined DNA/RNA Molecule: Synthetic oligonucleotide

SEQ ID NO: 3037 - DNA, 49 bp, Artificial Sequence; identical to SEQ ID NO: 808
  Description of Artificial Sequence: Synthetic oligonucleotide

SEQ ID NO: 3038 - DNA, 24 bp, Artificial Sequence
  Description of Artificial Sequence: Synthetic probe
aaccccacaactcccagtgctgca

SEQ ID NO: 3039 - DNA, 19 bp, Artificial Sequence
  Description of Artificial Sequence: Synthetic primer
tccggaccttcatcctcca

SEQ ID NO: 3040 - DNA, 20 bp, Artificial Sequence
  Description of Artificial Sequence: Synthetic primer
tactatcgtgttcctgccca

SEQ ID NO: 3041 - DNA, 53 bp, Artificial Sequence; identical to SEQ ID NO: 812
  Description of Artificial Sequence: Synthetic primer
  Description of Combined DNA/RNA Molecule: Synthetic primer

SEQ ID NO: 3042 - DNA, 41 bp, Artificial Sequence; identical to SEQ ID NO: 813
  Description of Artificial Sequence: Synthetic primer
  Description of Combined DNA/RNA Molecule: Synthetic primer

SEQ ID NO: 3043 - DNA, 44 bp, Artificial Sequence; identical to SEQ ID NO: 814
  Description of Artificial Sequence: Synthetic primer
  Description of Combined DNA/RNA Molecule: Synthetic primer

SEQ ID NO: 3044 - DNA, 56 bp, Artificial Sequence; identical to SEQ ID NO: 815
  Description of Artificial Sequence: Synthetic primer
  Description of Combined DNA/RNA Molecule: Synthetic primer

SEQ ID NO: 3045 - DNA, 51 bp, Artificial Sequence; identical to SEQ ID NO: 816
  Description of Artificial Sequence: Synthetic oligonucleotide
  Description of Combined DNA/RNA Molecule: Synthetic oligonucleotide

SEQ ID NO: 3046 - DNA, 51 bp, Artificial Sequence; identical to SEQ ID NO: 817
  Description of Artificial Sequence: Synthetic oligonucleotide

SEQ ID NO: 3047 - DNA, 28 bp, Artificial Sequence
  Description of Artificial Sequence: Synthetic probe
aagggagcaggcagacctttcatcaaca

SEQ ID NO: 3048 - DNA, 19 bp, Artificial Sequence
  Description of Artificial Sequence: Synthetic primer
ttagccgccaaacgtacca

SEQ ID NO: 3049 - DNA, 20 bp, Artificial Sequence
  Description of Artificial Sequence: Synthetic primer
tactatcgtgttcctgccca

SEQ ID NO: 3050 - DNA, 38 bp, Artificial Sequence; identical to SEQ ID NO: 821
  Description of Artificial Sequence: Synthetic primer
  Description of Combined DNA/RNA Molecule: Synthetic primer

SEQ ID NO: 3051 - DNA, 38 bp, Artificial Sequence; identical to SEQ ID NO: 822
  Description of Artificial Sequence: Synthetic primer
  Description of Combined DNA/RNA Molecule: Synthetic primer

SEQ ID NO: 3052 - DNA, 51 bp, Artificial Sequence; identical to SEQ ID NO: 823
  Description of Artificial Sequence: Synthetic primer
  Description of Combined DNA/RNA Molecule: Synthetic primer

SEQ ID NO: 3053 - DNA, 45 bp, Artificial Sequence; identical to SEQ ID NO: 824
  Description of Artificial Sequence: Synthetic oligonucleotide
  Description of Combined DNA/RNA Molecule: Synthetic oligonucleotide

SEQ ID NO: 3054 - DNA, 41 bp, Artificial Sequence; identical to SEQ ID NO: 825
  Description of Artificial Sequence: Synthetic oligonucleotide

SEQ ID NO: 3055 - DNA, 18 bp, Artificial Sequence
  Description of Artificial Sequence: Synthetic probe
aagggcccacccccacct

SEQ ID NO: 3056 - DNA, 20 bp, Artificial Sequence
  Description of Artificial Sequence: Synthetic primer
tagcagctgaacaacccaac

SEQ ID NO: 3057 - DNA, 20 bp, Artificial Sequence
  Description of Artificial Sequence: Synthetic primer
tagcatgccgaccatacaac

SEQ ID NO: 3058 - DNA, 47 bp, Artificial Sequence; identical to SEQ ID NO: 829
  Description of Artificial Sequence: Synthetic primer
  Description of Combined DNA/RNA Molecule: Synthetic primer

SEQ ID NO: 3059 - DNA, 39 bp, Artificial Sequence; identical to SEQ ID NO: 830
  Description of Artificial Sequence: Synthetic primer
  Description of Combined DNA/RNA Molecule: Synthetic primer

SEQ ID NO: 3060 - DNA, 39 bp, Artificial Sequence; identical to SEQ ID NO: 831
  Description of Artificial Sequence: Synthetic primer
  Description of Combined DNA/RNA Molecule: Synthetic primer

SEQ ID NO: 3061 - DNA, 51 bp, Artificial Sequence; identical to SEQ ID NO: 832
  Description of Artificial Sequence: Synthetic primer
  Description of Combined DNA/RNA Molecule: Synthetic primer

SEQ ID NO: 3062 - DNA, 51 bp, Artificial Sequence; identical to SEQ ID NO: 833
  Description of Artificial Sequence: Synthetic oligonucleotide
  Description of Combined DNA/RNA Molecule: Synthetic oligonucleotide

SEQ ID NO: 3063 - DNA, 50 bp, Artificial Sequence; identical to SEQ ID NO: 834
  Description of Artificial Sequence: Synthetic oligonucleotide

SEQ ID NO: 3064 - DNA, 29 bp, Artificial Sequence
  Description of Artificial Sequence: Synthetic probe
ttgtaagcacctcacctctagtggcaagt

SEQ ID NO: 3065 - DNA, 19 bp, Artificial Sequence
  Description of Artificial Sequence: Synthetic primer
tctgcccttcgcttcgaac

SEQ ID NO: 3066 - DNA, 20 bp, Artificial Sequence
  Description of Artificial Sequence: Synthetic primer
tagcatgccgaccatacaac

SEQ ID NO: 3067 - DNA, 46 bp, Artificial Sequence; identical to SEQ ID NO: 838
  Description of Artificial Sequence: Synthetic primer
  Description of Combined DNA/RNA Molecule: Synthetic primer

SEQ ID NO: 3068 - DNA, 39 bp, Artificial Sequence; identical to SEQ ID NO: 1490
  Description of Artificial Sequence: Synthetic primer
  Description of Combined DNA/RNA Molecule: Synthetic primer

SEQ ID NO: 3069 - DNA, 37 bp, Artificial Sequence; identical to SEQ ID NO: 1491
  Description of Artificial Sequence: Synthetic primer
  Description of Combined DNA/RNA Molecule: Synthetic primer

SEQ ID NO: 3070 - DNA, 51 bp, Artificial Sequence; identical to SEQ ID NO: 1492
  Description of Artificial Sequence: Synthetic primer
  Description of Combined DNA/RNA Molecule: Synthetic primer

SEQ ID NO: 3071 - DNA, 43 bp, Artificial Sequence; identical to SEQ ID NO: 1493
  Description of Artificial Sequence: Synthetic oligonucleotide
  Description of Combined DNA/RNA Molecule: Synthetic oligonucleotide

SEQ ID NO: 3072 - DNA, 54 bp, Artificial Sequence; identical to SEQ ID NO: 1494
  Description of Artificial Sequence: Synthetic oligonucleotide

SEQ ID NO: 3073 - DNA, 34 bp, Artificial Sequence; identical to SEQ ID NO: 1495
  Description of Artificial Sequence: Synthetic probe

SEQ ID NO: 3074 - DNA, 19 bp, Artificial Sequence
  Description of Artificial Sequence: Synthetic primer
tccggcctttgacgatacc

SEQ ID NO: 3075 - DNA, 22 bp, Artificial Sequence
  Description of Artificial Sequence: Synthetic primer
tgctccgttcgagtgaattacc

SEQ ID NO: 3076 - DNA, 49 bp, Artificial Sequence; identical to SEQ ID NO: 1498
  Description of Artificial Sequence: Synthetic primer
  Description of Combined DNA/RNA Molecule: Synthetic primer

SEQ ID NO: 3077 - DNA, 46 bp, Artificial Sequence; identical to SEQ ID NO: 1499
  Description of Artificial Sequence: Synthetic primer
  Description of Combined DNA/RNA Molecule: Synthetic primer

SEQ ID NO: 3078 - DNA, 57 bp, Artificial Sequence; identical to SEQ ID NO: 1500
  Description of Artificial Sequence: Synthetic primer
  Description of Combined DNA/RNA Molecule: Synthetic primer

SEQ ID NO: 3079 - DNA, 53 bp, Artificial Sequence; identical to SEQ ID NO: 1501
  Description of Artificial Sequence: Synthetic oligonucleotide
  Description of Combined DNA/RNA Molecule: Synthetic oligonucleotide

SEQ ID NO: 3080 - DNA, 45 bp, Artificial Sequence; identical to SEQ ID NO: 1502
  Description of Artificial Sequence: Synthetic oligonucleotide

SEQ ID NO: 3081 - DNA, 29 bp, Artificial Sequence
  Description of Artificial Sequence: Synthetic probe
ttggaggcaacaaggagaggcagaggaag

SEQ ID NO: 3082 - DNA, 19 bp, Artificial Sequence
  Description of Artificial Sequence: Synthetic primer
tccggcctttgacgatacc

SEQ ID NO: 3083 - DNA, 22 bp, Artificial Sequence
  Description of Artificial Sequence: Synthetic primer
tgctccgttcgagtgaattacc

SEQ ID NO: 3084 - DNA, 47 bp, Artificial Sequence; identical to SEQ ID NO: 1506
  Description of Artificial Sequence: Synthetic primer
  Description of Combined DNA/RNA Molecule: Synthetic primer

SEQ ID NO: 3085 - DNA, 36 bp, Artificial Sequence; identical to SEQ ID NO: 1559
  Description of Artificial Sequence: Synthetic primer
  Description of Combined DNA/RNA Molecule: Synthetic primer

SEQ ID NO: 3086 - DNA, 36 bp, Artificial Sequence; identical to SEQ ID NO: 1560
  Description of Artificial Sequence: Synthetic primer
  Description of Combined DNA/RNA Molecule: Synthetic primer

SEQ ID NO: 3087 - DNA, 58 bp, Artificial Sequence; identical to SEQ ID NO: 1561
  Description of Artificial Sequence: Synthetic primer
  Description of Combined DNA/RNA Molecule: Synthetic primer

SEQ ID NO: 3088 - DNA, 48 bp, Artificial Sequence; identical to SEQ ID NO: 1562
  Description of Artificial Sequence: Synthetic oligonucleotide
  Description of Combined DNA/RNA Molecule: Synthetic oligonucleotide

SEQ ID NO: 3089 - DNA, 47 bp, Artificial Sequence; identical to SEQ ID NO: 1563
  Description of Artificial Sequence: Synthetic oligonucleotide

SEQ ID NO: 3090 - DNA, 25 bp, Artificial Sequence
  Description of Artificial Sequence: Synthetic probe
ttagcctcaccacccaggttcaagg

SEQ ID NO: 3091 - DNA, 22 bp, Artificial Sequence
  Description of Artificial Sequence: Synthetic primer
tcgatggtcaatgagcttcaca

SEQ ID NO: 3092 - DNA, 22 bp, Artificial Sequence
  Description of Artificial Sequence: Synthetic primer
tggagagggagatcacgtaaca

SEQ ID NO: 3093 - DNA, 54 bp, Artificial Sequence; identical to SEQ ID NO: 1567
  Description of Artificial Sequence: Synthetic primer
  Description of Combined DNA/RNA Molecule: Synthetic primer

SEQ ID NO: 3094 - DNA, 38 bp, Artificial Sequence; identical to SEQ ID NO: 1586
  Description of Artificial Sequence: Synthetic primer
  Description of Combined DNA/RNA Molecule: Synthetic primer

SEQ ID NO: 3095 - DNA, 38 bp, Artificial Sequence; identical to SEQ ID NO: 1587
  Description of Artificial Sequence: Synthetic primer
  Description of Combined DNA/RNA Molecule: Synthetic primer

SEQ ID NO: 3096 - DNA, 51 bp, Artificial Sequence; identical to SEQ ID NO: 1588
  Description of Artificial Sequence: Synthetic primer
  Description of Combined DNA/RNA Molecule: Synthetic primer

SEQ ID NO: 3097 - DNA, 43 bp, Artificial Sequence; identical to SEQ ID NO: 1589
  Description of Artificial Sequence: Synthetic oligonucleotide
  Description of Combined DNA/RNA Molecule: Synthetic oligonucleotide

SEQ ID NO: 3098 - DNA, 51 bp, Artificial Sequence; identical to SEQ ID NO: 1590
  Description of Artificial Sequence: Synthetic oligonucleotide

SEQ ID NO: 3099 - DNA, 25 bp, Artificial Sequence
  Description of Artificial Sequence: Synthetic probe
ttcagcccagtcactagcctgccac

SEQ ID NO: 3100 - DNA, 19 bp, Artificial Sequence
  Description of Artificial Sequence: Synthetic primer
tctcgattacgctccgcac

SEQ ID NO: 3101 - DNA, 22 bp, Artificial Sequence
  Description of Artificial Sequence: Synthetic primer
tggccatgtctaagctacacac

SEQ ID NO: 3102 - DNA, 46 bp, Artificial Sequence; identical to SEQ ID NO: 1594
  Description of Artificial Sequence: Synthetic primer
  Description of Combined DNA/RNA Molecule: Synthetic primer

SEQ ID NO: 3103 - DNA, 36 bp, Artificial Sequence; identical to SEQ ID NO: 1595
  Description of Artificial Sequence: Synthetic primer
  Description of Combined DNA/RNA Molecule: Synthetic primer

SEQ ID NO: 3104 - DNA, 39 bp, Artificial Sequence; identical to SEQ ID NO: 1596
  Description of Artificial Sequence: Synthetic primer
  Description of Combined DNA/RNA Molecule: Synthetic primer

SEQ ID NO: 3105 - DNA, 54 bp, Artificial Sequence; identical to SEQ ID NO: 1597
  Description of Artificial Sequence: Synthetic primer
  Description of Combined DNA/RNA Molecule: Synthetic primer

SEQ ID NO: 3106 - DNA, 45 bp, Artificial Sequence; identical to SEQ ID NO: 1598
  Description of Artificial Sequence: Synthetic oligonucleotide
  Description of Combined DNA/RNA Molecule: Synthetic oligonucleotide

SEQ ID NO: 3107 - DNA, 52 bp, Artificial Sequence; identical to SEQ ID NO: 1599
  Description of Artificial Sequence: Synthetic oligonucleotide

SEQ ID NO: 3108 - DNA, 33 bp, Artificial Sequence; identical to SEQ ID NO: 1600
  Description of Artificial Sequence: Synthetic probe

SEQ ID NO: 3109 - DNA, 21 bp, Artificial Sequence
  Description of Artificial Sequence: Synthetic primer
tcacagagacttgccgatcac

SEQ ID NO: 3110 - DNA, 22 bp, Artificial Sequence
  Description of Artificial Sequence: Synthetic primer
tggccatgtctaagctacacac

SEQ ID NO: 3111 - DNA, 44 bp, Artificial Sequence; identical to SEQ ID NO: 1603
  Description of Artificial Sequence: Synthetic primer
  Description of Combined DNA/RNA Molecule: Synthetic primer

SEQ ID NO: 3112 - DNA, 39 bp, Artificial Sequence; identical to SEQ ID NO: 1604
  Description of Artificial Sequence: Synthetic primer
  Description of Combined DNA/RNA Molecule: Synthetic primer

SEQ ID NO: 3113 - DNA, 39 bp, Artificial Sequence; identical to SEQ ID NO: 1605
  Description of Artificial Sequence: Synthetic primer
  Description of Combined DNA/RNA Molecule: Synthetic primer

SEQ ID NO: 3114 - DNA, 48 bp, Artificial Sequence; identical to SEQ ID NO: 1606
  Description of Artificial Sequence: Synthetic primer
  Description of Combined DNA/RNA Molecule: Synthetic primer

SEQ ID NO: 3115 - DNA, 47 bp, Artificial Sequence; identical to SEQ ID NO: 1607
  Description of Artificial Sequence: Synthetic oligonucleotide
  Description of Combined DNA/RNA Molecule: Synthetic oligonucleotide

SEQ ID NO: 3116 - DNA, 46 bp, Artificial Sequence; identical to SEQ ID NO: 1608
  Description of Artificial Sequence: Synthetic oligonucleotide

SEQ ID NO: 3117 - DNA, 28 bp, Artificial Sequence
  Description of Artificial Sequence: Synthetic probe
aattcctcatccctccacacacaccctg

SEQ ID NO: 3118 - DNA, 21 bp, Artificial Sequence
  Description of Artificial Sequence: Synthetic primer
tcacagagacttgccgatcac

SEQ ID NO: 3119 - DNA, 22 bp, Artificial Sequence
  Description of Artificial Sequence: Synthetic primer
tggccatgtctaagctacacac

SEQ ID NO: 3120 - DNA, 46 bp, Artificial Sequence; identical to SEQ ID NO: 1612
  Description of Artificial Sequence: Synthetic primer
  Description of Combined DNA/RNA Molecule: Synthetic primer

SEQ ID NO: 3121 - DNA, 37 bp, Artificial Sequence; identical to SEQ ID NO: 2191
  Description of Artificial Sequence: Synthetic primer
  Description of Combined DNA/RNA Molecule: Synthetic primer

SEQ ID NO: 3122 - DNA, 41 bp, Artificial Sequence; identical to SEQ ID NO: 2192
  Description of Artificial Sequence: Synthetic primer
  Description of Combined DNA/RNA Molecule: Synthetic primer

SEQ ID NO: 3123 - DNA, 53 bp, Artificial Sequence; identical to SEQ ID NO: 2193
  Description of Artificial Sequence: Synthetic primer
  Description of Combined DNA/RNA Molecule: Synthetic primer

SEQ ID NO: 3124 - DNA, 49 bp, Artificial Sequence; identical to SEQ ID NO: 2194
  Description of Artificial Sequence: Synthetic oligonucleotide
  Description of Combined DNA/RNA Molecule: Synthetic oligonucleotide

SEQ ID NO: 3125 - DNA, 46 bp, Artificial Sequence; identical to SEQ ID NO: 2195
  Description of Artificial Sequence: Synthetic oligonucleotide

SEQ ID NO: 3126 - DNA, 22 bp, Artificial Sequence
  Description of Artificial Sequence: Synthetic probe
tttcccgcagaggcactcagag

SEQ ID NO: 3127 - DNA, 19 bp, Artificial Sequence
  Description of Artificial Sequence: Synthetic primer
ttcgtgggcacacaagcaa

SEQ ID NO: 3128 - DNA, 22 bp, Artificial Sequence
  Description of Artificial Sequence: Synthetic primer
tcaggtagatcaagccaagcaa

SEQ ID NO: 3129 - DNA, 50 bp, Artificial Sequence; identical to SEQ ID NO: 2199
  Description of Artificial Sequence: Synthetic primer
  Description of Combined DNA/RNA Molecule: Synthetic primer

SEQ ID NO: 3130 - DNA, 43 bp, Artificial Sequence
  Description of Artificial Sequence: Synthetic primer
  Description of Combined DNA/RNA Molecule: Synthetic primer
acgacgacgacgaacatccctgtctccacttcccagcacaggt

SEQ ID NO: 3131 - DNA, 41 bp, Artificial Sequence
  Description of Artificial Sequence: Synthetic primer
  Description of Combined DNA/RNA Molecule: Synthetic primer
acgacgacgacgaagggcatccctgtctccacttcccagcg

SEQ ID NO: 3132 - DNA, 49 bp, Artificial Sequence
  Description of Artificial Sequence: Synthetic primer
  Description of Combined DNA/RNA Molecule: Synthetic primer
acgacgacgacttgacgaacataatgggccaggtggtggtgagcugtga

SEQ ID NO: 3133 - DNA, 43 bp, Artificial Sequence
  Description of Artificial Sequence: Synthetic oligonucleotide
  Description of Combined DNA/RNA Molecule: Synthetic oligonucleotide
tcttacgcccagggaatgtaacaggctgggtgggaccaatgat

SEQ ID NO: 3134 - DNA, 44 bp, Artificial Sequence
  Description of Artificial Sequence: Synthetic oligonucleotide
atggccattaaagccccaccccccgttgtccggctgtggttaca

SEQ ID NO: 3135 - DNA, 27 bp, Artificial Sequence
  Description of Artificial Sequence: Synthetic probe
aagggaccaatggccattaaagcccca

SEQ ID NO: 3136 - DNA, 22 bp, Artificial Sequence
  Description of Artificial Sequence: Synthetic primer
tcttacgcccagggaatgtaac

SEQ ID NO: 3137 - DNA, 20 bp, Artificial Sequence
  Description of Artificial Sequence: Synthetic primer
tgtaaccacagccggacaac

SEQ ID NO: 3138 - DNA, 45 bp, Artificial Sequence
  Description of Artificial Sequence: Synthetic primer
  Description of Combined DNA/RNA Molecule: Synthetic primer
tgtaaccacagccggacaacgccaggtggtggtgagctgtgggag

SEQ ID NO: 3139 - DNA, 46 bp, Artificial Sequence
  Description of Artificial Sequence: Synthetic primer
  Description of Combined DNA/RNA Molecule: Synthetic primer
acgacgacgacgaacaagatcatcaaggagcacaaggagcacatgc

SEQ ID NO: 3140 - DNA, 46 bp, Artificial Sequence
  Description of Artificial Sequence: Synthetic primer
  Description of Combined DNA/RNA Molecule: Synthetic primer
acgacgacgacgaacagcaccaagatcatcaaggagcacaaggagt

SEQ ID NO: 3141 - DNA, 46 bp, Artificial Sequence
  Description of Artificial Sequence: Synthetic primer
  Description of Combined DNA/RNA Molecule: Synthetic primer
acgacgacgacttgacgaacataatcctgccctgccctggcctggt

SEQ ID NO: 3142 - DNA, 52 bp, Artificial Sequence
  Description of Artificial Sequence: Synthetic oligonucleotide
  Description of Combined DNA/RNA Molecule: Synthetic oligonucleotide
tgagcaaaatcttcgtcgaccgttccaggaggccatcatcaagatcauggac

SEQ ID NO: 3143 - DNA, 40 bp, Artificial Sequence
  Description of Artificial Sequence: Synthetic oligonucleotide
tgggtgcagcacagggccagggttcgatgccttccgtaca

SEQ ID NO: 3144 - DNA, 26 bp, Artificial Sequence
  Description of Artificial Sequence: Synthetic probe
aaaagatcatgggtgcagcacagggc

SEQ ID NO: 3145 - DNA, 21 bp, Artificial Sequence
  Description of Artificial Sequence: Synthetic primer
tgagcaaaatcttcgtcgacc

SEQ ID NO: 3146 - DNA, 20 bp, Artificial Sequence
  Description of Artificial Sequence: Synthetic primer
tgtacggaaggcatcgaacc

SEQ ID NO: 3147 - DNA, 41 bp, Artificial Sequence
  Description of Artificial Sequence: Synthetic primer
  Description of Combined DNA/RNA Molecule: Synthetic primer
tgtacggaaggcatcgaacctgccctgccctggcttggcct

SEQ ID NO: 3148 - DNA, 42 bp, Artificial Sequence
  Description of Artificial Sequence: Synthetic primer
  Description of Combined DNA/RNA Molecule: Synthetic primer
acgacgacgacgaagtggaagcacaggagcacacacaggaga

SEQ ID NO: 3149 - DNA, 42 bp, Artificial Sequence
  Description of Artificial Sequence: Synthetic primer
  Description of Combined DNA/RNA Molecule: Synthetic primer
acgacgacgacgaagaagcacaggagcacacacaggaggctg

SEQ ID NO: 3150 - DNA, 53 bp, Artificial Sequence
  Description of Artificial Sequence: Synthetic primer
  Description of Combined DNA/RNA Molecule: Synthetic primer
acgacgacgacttgacgaacataatggagggttttcagtgctgggtgagggtt

SEQ ID NO: 3151 - DNA, 51 bp, Artificial Sequence
  Description of Artificial Sequence: Synthetic oligonucleotide
  Description of Combined DNA/RNA Molecule: Synthetic oligonucleotide
tggcacatgagagtagttgaccagaggaacctctgtgagttccgcagcaag

SEQ ID NO: 3152 - DNA, 50 bp, Artificial Sequence
  Description of Artificial Sequence: Synthetic oligonucleotide
gcagaggctagaacatcactgtggctgcagggttcgatgccttccgtaca

SEQ ID NO: 3153 - DNA, 30 bp, Artificial Sequence
  Description of Artificial Sequence: Synthetic probe
ttttccgcagcagaggctagaacatcactg

SEQ ID NO: 3154 - DNA, 22 bp, Artificial Sequence
  Description of Artificial Sequence: Synthetic primer
tggcacatgagagtagttgacc

SEQ ID NO: 3155 - DNA, 20 bp, Artificial Sequence
  Description of Artificial Sequence: Synthetic primer
tgtacggaaggcatcgaacc

SEQ ID NO: 3156 - DNA, 45 bp, Artificial Sequence
  Description of Artificial Sequence: Synthetic primer
  Description of Combined DNA/RNA Molecule: Synthetic primer
tgtacggaaggcatcgaacccagtgctgggtgagggtcttgcagt

SEQ ID NO: 3157 - DNA, 39 bp, Artificial Sequence
  Description of Artificial Sequence: Synthetic primer
  Description of Combined DNA/RNA Molecule: Synthetic primer
acgacgacgacgaagccagcccacaagcatgacaggaaa

SEQ ID NO: 3158 - DNA, 41 bp, Artificial Sequence
  Description of Artificial Sequence: Synthetic primer
  Description of Combined DNA/RNA Molecule: Synthetic primer
acgacgacgacgaacagcccacaagcatgacaggaagctat

SEQ ID NO: 3159 - DNA, 52 bp, Artificial Sequence
  Description of Artificial Sequence: Synthetic primer
  Description of Combined DNA/RNA Molecule: Synthetic primer
acgacgacgacttgacgaacataatcttgcagaggccttggtctggguggta

SEQ ID NO: 3160 - DNA, 50 bp, Artificial Sequence
  Description of Artificial Sequence: Synthetic oligonucleotide
  Description of Combined DNA/RNA Molecule: Synthetic oligonucleotide
tatagtcacgcaggaccacagaggtgatcaagcacaagcactacaugtat

SEQ ID NO: 3161 - DNA, 48 bp, Artificial Sequence
  Description of Artificial Sequence: Synthetic oligonucleotide
tgtgcaaggagatcaaggcacaccacctgtttgcggctgtctatgaca

SEQ ID NO: 3162 - DNA, 31 bp, Artificial Sequence
  Description of Artificial Sequence: Synthetic probe
ttcactacatgtgcaaggagatcaaggcaca

SEQ ID NO: 3163 - DNA, 20 bp, Artificial Sequence
  Description of Artificial Sequence: Synthetic primer
tatagtcacgcaggaccaca

SEQ ID NO: 3164 - DNA, 21 bp, Artificial Sequence
  Description of Artificial Sequence: Synthetic primer
tgtcatagacagccgcaaaca

SEQ ID NO: 3165 - DNA, 46 bp, Artificial Sequence
  Description of Artificial Sequence: Synthetic primer
  Description of Combined DNA/RNA Molecule: Synthetic primer
tgtcatagacagccgcaaacagcagaggccttggtctggatugtgt

SEQ ID NO: 3166 - DNA, 40 bp, Artificial Sequence
  Description of Artificial Sequence: Synthetic primer
  Description of Combined DNA/RNA Molecule: Synthetic primer
acgacgacgacgaagcactgtggtcagtgcaggcauggcg

SEQ ID NO: 3167 - DNA, 39 bp, Artificial Sequence
  Description of Artificial Sequence: Synthetic primer
  Description of Combined DNA/RNA Molecule: Synthetic primer
acgacgacgacgaagtggtcagtgcaggcatggcaggga

SEQ ID NO: 3168 - DNA, 55 bp, Artificial Sequence
  Description of Artificial Sequence: Synthetic primer
  Description of Combined DNA/RNA Molecule: Synthetic primer
acgacgacgacttgacgaacataatgtgagaagatggcagcctggcttacuctgt

SEQ ID NO: 3169 - DNA, 49 bp, Artificial Sequence
  Description of Artificial Sequence: Synthetic oligonucleotide
  Description of Combined DNA/RNA Molecule: Synthetic oligonucleotide
tgccctatcgaaaaggacaacaggcagggcagccttatcacccagcttc

SEQ ID NO: 3170 - DNA, 47 bp, Artificial Sequence
  Description of Artificial Sequence: Synthetic oligonucleotide
gctctcccacctacacctcccactgctgtttgcggctgtctatgaca

SEQ ID NO: 3171 - DNA, 26 bp, Artificial Sequence
  Description of Artificial Sequence: Synthetic probe
cctcacccagctctcccacctacacc

SEQ ID NO: 3172 - DNA, 22 bp, Artificial Sequence
  Description of Artificial Sequence: Synthetic primer
tgccctatcgaaaaggacaaca

SEQ ID NO: 3173 - DNA, 21 bp, Artificial Sequence
  Description of Artificial Sequence: Synthetic primer
tgtcatagacagccgcaaaca

SEQ ID NO: 3174 - DNA, 48 bp, Artificial Sequence
  Description of Artificial Sequence: Synthetic primer
  Description of Combined DNA/RNA Molecule: Synthetic primer
tgtcatagacagccgcaaacagcagcctggcttactctgcaatgggaa

SEQ ID NO: 3175 - DNA, 46 bp, Artificial Sequence
  Description of Artificial Sequence: Synthetic primer
  Description of Combined DNA/RNA Molecule: Synthetic primer
acgacgacgacgaatagtttcagggaagaaaaggtggctcaagtgg

SEQ ID NO: 3176 - DNA, 45 bp, Artificial Sequence
  Description of Artificial Sequence: Synthetic primer
  Description of Combined DNA/RNA Molecule: Synthetic primer
acgacgacgacgaacagggaagaaaaggtggctcaagtgaggaag

SEQ ID NO: 3177 - DNA, 49 bp, Artificial Sequence
  Description of Artificial Sequence: Synthetic primer
  Description of Combined DNA/RNA Molecule: Synthetic primer
acgacgacgacttgacgaacataatctggtgtggcagcagtgccccctc

SEQ ID NO: 3178 - DNA, 51 bp, Artificial Sequence
  Description of Artificial Sequence: Synthetic oligonucleotide
  Description of Combined DNA/RNA Molecule: Synthetic oligonucleotide
taatctccagacctccgaacccagaggcaacagtctctcatcatcaggatt

SEQ ID NO: 3179 - DNA, 43 bp, Artificial Sequence
  Description of Artificial Sequence: Synthetic oligonucleotide
ggaccccaccatgtgccacccggtgtaaggattgaacgggaca

SEQ ID NO: 3180 - DNA, 26 bp, Artificial Sequence
  Description of Artificial Sequence: Synthetic probe
aaatcatcaggaccccaccatgtgcc

SEQ ID NO: 3181 - DNA, 21 bp, Artificial Sequence
  Description of Artificial Sequence: Synthetic primer
taatctccagacctccgaacc

SEQ ID NO: 3182 - DNA, 22 bp, Artificial Sequence
  Description of Artificial Sequence: Synthetic primer
tgtcccgttcaatccttacacc

SEQ ID NO: 3183 - DNA, 45 bp, Artificial Sequence
  Description of Artificial Sequence: Synthetic primer
  Description of Combined DNA/RNA Molecule: Synthetic primer
tgtcccgttcaatccttacaccgcagcagtgcccccttatgtcct

SEQ ID NO: 3184 - DNA, 39 bp, Artificial Sequence
  Description of Artificial Sequence: Synthetic primer
  Description of Combined DNA/RNA Molecule: Synthetic primer
acgacgacgacgaacctggtcccacagcactccagggaa

SEQ ID NO: 3185 - DNA, 39 bp, Artificial Sequence
  Description of Artificial Sequence: Synthetic primer
  Description of Combined DNA/RNA Molecule: Synthetic primer
acgacgacgacgaagtcccacagcactccagggagggaa

SEQ ID NO: 3186 - DNA, 56 bp, Artificial Sequence
  Description of Artificial Sequence: Synthetic primer
  Description of Combined DNA/RNA Molecule: Synthetic primer
acgacgacgacttgacgaacataatgagcagattttgacaccccacccttgagctt

SEQ ID NO: 3187 - DNA, 42 bp, Artificial Sequence
  Description of Artificial Sequence: Synthetic oligonucleotide
  Description of Combined DNA/RNA Molecule: Synthetic oligonucleotide
ttttccgcgtcagagcacacccacagccacagggacacactt

SEQ ID NO: 3188 - DNA, 49 bp, Artificial Sequence
  Description of Artificial Sequence: Synthetic oligonucleotide
caccccactccagcctcacctgagaactgttatcggacctagctcgaca

SEQ ID NO: 3189 - DNA, 23 bp, Artificial Sequence
  Description of Artificial Sequence: Synthetic probe
ttagggacacaccccactccagc

SEQ ID NO: 3190 - DNA, 19 bp, Artificial Sequence
  Description of Artificial Sequence: Synthetic primer
ttttccgcgtcagagcaca

SEQ ID NO: 3191 - DNA, 22 bp, Artificial Sequence
  Description of Artificial Sequence: Synthetic primer
tgtcgagctaggtccgataaca

SEQ ID NO: 3192 - DNA, 50 bp, Artificial Sequence
  Description of Artificial Sequence: Synthetic primer
  Description of Combined DNA/RNA Molecule: Synthetic primer
tgtcgagctaggtccgataacactcagctcctggagttctcagatgaggt

SEQ ID NO: 3193 - DNA, 41 bp, Artificial Sequence
  Description of Artificial Sequence: Synthetic primer
  Description of Combined DNA/RNA Molecule: Synthetic primer
acgacgacgacgaacccagtcagagaagcaggcacagggac

SEQ ID NO: 3194 - DNA, 41 bp, Artificial Sequence
  Description of Artificial Sequence: Synthetic primer
  Description of Combined DNA/RNA Molecule: Synthetic primer
acgacgacgacgaagtcagagaagcaggcacagggaugggc

SEQ ID NO: 3195 - DNA, 57 bp, Artificial Sequence
  Description of Artificial Sequence: Synthetic primer
  Description of Combined DNA/RNA Molecule: Synthetic primer
acgacgacgacttgacgaacataatgactttgcaactgggtcaccttagatcuggag

SEQ ID NO: 3196 - DNA, 48 bp, Artificial Sequence
  Description of Artificial Sequence: Synthetic oligonucleotide
  Description of Combined DNA/RNA Molecule: Synthetic oligonucleotide
ttcgctgcccggttaaacagacacacagcttccaggtcaaacacttcc

SEQ ID NO: 3197 - DNA, 62 bp, Artificial Sequence
  Description of Artificial Sequence: Synthetic oligonucleotide
ctttttctttttcctcccagaaacaacagtgtcattctcttgttatcggacctagctcgaca

SEQ ID NO: 3198 - DNA, 39 bp, Artificial Sequence
  Description of Artificial Sequence: Synthetic probe
tttcaaacactttttctttttcctcccagaaacaacagt

SEQ ID NO: 3199 - DNA, 19 bp, Artificial Sequence
  Description of Artificial Sequence: Synthetic primer
ttcgctgcccggttaaaca

SEQ ID NO: 3200 - DNA, 22 bp, Artificial Sequence
  Description of Artificial Sequence: Synthetic primer
tgtcgagctaggtccgataaca

SEQ ID NO: 3201 - DNA, 55 bp, Artificial Sequence
  Description of Artificial Sequence: Synthetic primer
  Description of Combined DNA/RNA Molecule: Synthetic primer
tgtcgagctaggtccgataacagactttgcaactgggtcaccttagatttggaat

SEQ ID NO: 3202 - DNA, 47 bp, Artificial Sequence
  Description of Artificial Sequence: Synthetic primer
  Description of Combined DNA/RNA Molecule: Synthetic primer
acgacgacgacgaactgattgtaaacccaacttcccacctcagagcg

SEQ ID NO: 3203 - DNA, 47 bp, Artificial Sequence
  Description of Artificial Sequence: Synthetic primer
  Description of Combined DNA/RNA Molecule: Synthetic primer
acgacgacgacgaagaactgattgtaaacccaacttcccaccucagg

SEQ ID NO: 3204 - DNA, 59 bp, Artificial Sequence
  Description of Artificial Sequence: Synthetic primer
  Description of Combined DNA/RNA Molecule: Synthetic primer
acgacgacgacttgacgaacataatgctgtaaaatgaagtttgctcagtgagcagttag

SEQ ID NO: 3205 - DNA, 47 bp, Artificial Sequence
  Description of Artificial Sequence: Synthetic oligonucleotide
  Description of Combined DNA/RNA Molecule: Synthetic oligonucleotide
ttcgctgcccggttaaacagcaagccacagctcagagtaacaucacc

SEQ ID NO: 3206 - DNA, 58 bp, Artificial Sequence
  Description of Artificial Sequence: Synthetic oligonucleotide
tcattcaaaagccaccagagatatcaagagagctcctgttatcggacctagctcgaca

SEQ ID NO: 3207 - DNA, 37 bp, Artificial Sequence
  Description of Artificial Sequence: Synthetic probe
ttagtaacatcattcaaaagccaccagagatatcaag

SEQ ID NO: 3208 - DNA, 19 bp, Artificial Sequence
  Description of Artificial Sequence: Synthetic primer
ttcgctgcccggttaaaca

SEQ ID NO: 3209 - DNA, 22 bp, Artificial Sequence
  Description of Artificial Sequence: Synthetic primer
tgtcgagctaggtccgataaca

SEQ ID NO: 3210 - DNA, 43 bp, Artificial Sequence
  Description of Artificial Sequence: Synthetic primer
  Description of Combined DNA/RNA Molecule: Synthetic primer
acgacgacgacgaaccactgctgtgccattttttggcagcaga

SEQ ID NO: 3211 - DNA, 44 bp, Artificial Sequence
  Description of Artificial Sequence: Synthetic primer
  Description of Combined DNA/RNA Molecule: Synthetic primer
acgacgacgacgaacacttcaacacaacaccaccactgcugtgt

SEQ ID NO: 3212 - DNA, 49 bp, Artificial Sequence
  Description of Artificial Sequence: Synthetic primer
  Description of Combined DNA/RNA Molecule: Synthetic primer
acgacgacgacttgacgaacataatgaggatgcctgggtgggcagggta

SEQ ID NO: 3213 - DNA, 47 bp, Artificial Sequence
  Description of Artificial Sequence: Synthetic oligonucleotide
  Description of Combined DNA/RNA Molecule: Synthetic oligonucleotide
tgctatgccgcattcaaccaaggtctgtgctacacactgtcaagctg

SEQ ID NO: 3214 - DNA, 41 bp, Artificial Sequence
  Description of Artificial Sequence: Synthetic oligonucleotide
agccagctccccatgccaggtgtggagctagttcggcgaca

SEQ ID NO: 3215 - DNA, 25 bp, Artificial Sequence
  Description of Artificial Sequence: Synthetic probe
ttactgtcaagccagctccccatgc

SEQ ID NO: 3216 - DNA, 20 bp, Artificial Sequence
  Description of Artificial Sequence: Synthetic primer
tgctatgccgcattcaacca

SEQ ID NO: 3217 - DNA, 19 bp, Artificial Sequence
  Description of Artificial Sequence: Synthetic primer
tgtcgccgaactagctcca

SEQ ID NO: 3218 - DNA, 41 bp, Artificial Sequence
  Description of Artificial Sequence: Synthetic primer
  Description of Combined DNA/RNA Molecule: Synthetic primer
tgtcgccgaactagctccagcctgggtgggcaggatgggcg

SEQ ID NO: 3219 - DNA, 39 bp, Artificial Sequence
  Description of Artificial Sequence: Synthetic primer
  Description of Combined DNA/RNA Molecule: Synthetic primer
acgacgacgacgaatgaggcatcccaggcaaccaugtcg

SEQ ID NO: 3220 - DNA, 40 bp, Artificial Sequence
  Description of Artificial Sequence: Synthetic primer
  Description of Combined DNA/RNA Molecule: Synthetic primer
acgacgacgacgaactgtgaggcatcccaggcaaccatgc

SEQ ID NO: 3221 - DNA, 57 bp, Artificial Sequence
  Description of Artificial Sequence: Synthetic primer
  Description of Combined DNA/RNA Molecule: Synthetic primer
acgacgacgacttgacgaacataatgccctggctcactacacttctgttttcatcag

SEQ ID NO: 3222 - DNA, 50 bp, Artificial Sequence
  Description of Artificial Sequence: Synthetic oligonucleotide
  Description of Combined DNA/RNA Molecule: Synthetic oligonucleotide
tgtgccttacggaaaacccagtcaaaggacagttcaggaggcccauagaa

SEQ ID NO: 3223 - DNA, 49 bp, Artificial Sequence
  Description of Artificial Sequence: Synthetic oligonucleotide
taggagtgcagcaccaccagtagaaaatcctggagctagttcggcgaca

SEQ ID NO: 3224 - DNA, 23 bp, Artificial Sequence
  Description of Artificial Sequence: Synthetic probe
ttaggcccataggagtgcagcac

SEQ ID NO: 3225 - DNA, 20 bp, Artificial Sequence
  Description of Artificial Sequence: Synthetic primer
tgtgccttacggaaaaccca

SEQ ID NO: 3226 - DNA, 19 bp, Artificial Sequence
  Description of Artificial Sequence: Synthetic primer
tgtcgccgaactagctcca

SEQ ID NO: 3227 - DNA, 59 bp, Artificial Sequence
  Description of Artificial Sequence: Synthetic primer
  Description of Combined DNA/RNA Molecule: Synthetic primer
tgtcgccgaactagctccacactacacttctgttttcatcaaggattttctattggtga

SEQ ID NO: 3228 - DNA, 40 bp, Artificial Sequence
  Description of Artificial Sequence: Synthetic primer
  Description of Combined DNA/RNA Molecule: Synthetic primer
acgacgacgacgaaccttgtgcaacatgggctgcaccaaa

SEQ ID NO: 3229 - DNA, 39 bp, Artificial Sequence
  Description of Artificial Sequence: Synthetic primer
  Description of Combined DNA/RNA Molecule: Synthetic primer
acgacgacgacgaagggccttgtgcaacatgggcugcat

SEQ ID NO: 3230 - DNA, 55 bp, Artificial Sequence
  Description of Artificial Sequence: Synthetic primer
  Description of Combined DNA/RNA Molecule: Synthetic primer
acgacgacgacttgacgaacataattgacctatggtggccattgctgttcutgct

SEQ ID NO: 3231 - DNA, 47 bp, Artificial Sequence
  Description of Artificial Sequence: Synthetic oligonucleotide
  Description of Combined DNA/RNA Molecule: Synthetic oligonucleotide
tcctgctctgaaaacctacaccccaagggcaaggcagtgacagcaat

SEQ ID NO: 3232 - DNA, 46 bp, Artificial Sequence
  Description of Artificial Sequence: Synthetic oligonucleotide
gcagccaccccaacagagctgcagggttacataggcggcttagaca

SEQ ID NO: 3233 - DNA, 25 bp, Artificial Sequence
  Description of Artificial Sequence: Synthetic probe
ttagtgacagcagccaccccaacag

SEQ ID NO: 3234 - DNA, 22 bp, Artificial Sequence
  Description of Artificial Sequence: Synthetic primer
tcctgctctgaaaacctacacc

SEQ ID NO: 3235 - DNA, 22 bp, Artificial Sequence
  Description of Artificial Sequence: Synthetic primer
tgtctaagccgcctatgtaacc

SEQ ID NO: 3236 - DNA, 51 bp, Artificial Sequence
  Description of Artificial Sequence: Synthetic primer
  Description of Combined DNA/RNA Molecule: Synthetic primer
tgtctaagccgcctatgtaacctggccattgctgttcttgccttctgtcta

SEQ ID NO: 3237 - DNA, 39 bp, Artificial Sequence
  Description of Artificial Sequence: Synthetic primer
  Description of Combined DNA/RNA Molecule: Synthetic primer
acgacgacgacgaacctgaggcactcatgctccaccagt

SEQ ID NO: 3238 - DNA, 40 bp, Artificial Sequence
  Description of Artificial Sequence: Synthetic primer
  Description of Combined DNA/RNA Molecule: Synthetic primer
acgacgacgacgaactgcacctacctgaggcactcatgcc

SEQ ID NO: 3239 - DNA, 49 bp, Artificial Sequence
  Description of Artificial Sequence: Synthetic primer
  Description of Combined DNA/RNA Molecule: Synthetic primer
acgacgacgacttgacgaacataatgatggagggcctggttgccuggaa

SEQ ID NO: 3240 - DNA, 44 bp, Artificial Sequence
  Description of Artificial Sequence: Synthetic oligonucleotide
  Description of Combined DNA/RNA Molecule: Synthetic oligonucleotide
tttttacgcacagcaccacccagccagctgcacaggacaccttt

SEQ ID NO: 3241 - DNA, 47 bp, Artificial Sequence
  Description of Artificial Sequence: Synthetic oligonucleotide
cctcctccacacaggcctccagcttggttacataggcggcttagaca

SEQ ID NO: 3242 - DNA, 25 bp, Artificial Sequence
  Description of Artificial Sequence: Synthetic probe
ttcaggacacctcctccacacaggc

SEQ ID NO: 3243 - DNA, 20 bp, Artificial Sequence
  Description of Artificial Sequence: Synthetic primer
tttttacgcacagcaccacc

SEQ ID NO: 3244 - DNA, 22 bp, Artificial Sequence
  Description of Artificial Sequence: Synthetic primer
tgtctaagccgcctatgtaacc

SEQ ID NO: 3245 - DNA, 48 bp, Artificial Sequence
  Description of Artificial Sequence: Synthetic primer
  Description of Combined DNA/RNA Molecule: Synthetic primer
tgtctaagccgcctatgtaacccctggttgcctggaggaagttggaga

SEQ ID NO: 3246 - DNA, 40 bp, Artificial Sequence
  Description of Artificial Sequence: Synthetic primer
  Description of Combined DNA/RNA Molecule: Synthetic primer
acgacgacgacgaagcccaagtggaggtgtcaccaggcct

SEQ ID NO: 3247 - DNA, 41 bp, Artificial Sequence
  Description of Artificial Sequence: Synthetic primer
  Description of Combined DNA/RNA Molecule: Synthetic primer
acgacgacgacgaacaagtggaggtgtcaccaggcccaagc

SEQ ID NO: 3248 - DNA, 60 bp, Artificial Sequence
  Description of Artificial Sequence: Synthetic primer
  Description of Combined DNA/RNA Molecule: Synthetic primer
acgacgacgacttgacgaacataatcctgatagaaagaggaagactaatgagggaggcta

SEQ ID NO: 3249 - DNA, 45 bp, Artificial Sequence
  Description of Artificial Sequence: Synthetic oligonucleotide
  Description of Combined DNA/RNA Molecule: Synthetic oligonucleotide
tggacacttcgcccttcttaaccccccatcaccagcctcagctac

SEQ ID NO: 3250 - DNA, 49 bp, Artificial Sequence
  Description of Artificial Sequence: Synthetic oligonucleotide
gctgtagatgcacaggcagcaccacctggtttgggatctgggcatcaca

SEQ ID NO: 3251 - DNA, 26 bp, Artificial Sequence
  Description of Artificial Sequence: Synthetic probe
ttagcctcagctgtagatgcacaggc

SEQ ID NO: 3252 - DNA, 22 bp, Artificial Sequence
  Description of Artificial Sequence: Synthetic primer
tggacacttcgcccttcttaac

SEQ ID NO: 3253 - DNA, 21 bp, Artificial Sequence
  Description of Artificial Sequence: Synthetic primer
tgtgatgcccagatcccaaac

SEQ ID NO: 3254 - DNA, 42 bp, Artificial Sequence
  Description of Artificial Sequence: Synthetic primer
  Description of Combined DNA/RNA Molecule: Synthetic primer
tgtgatgcccagatcccaaacgctgagggcaggtgatgctgt

SEQ ID NO: 3255 - DNA, 42 bp, Artificial Sequence
  Description of Artificial Sequence: Synthetic primer
  Description of Combined DNA/RNA Molecule: Synthetic primer
acgacgacgacgaactctgaagccttggagggcaacauggac

SEQ ID NO: 3256 - DNA, 41 bp, Artificial Sequence
  Description of Artificial Sequence: Synthetic primer
  Description of Combined DNA/RNA Molecule: Synthetic primer
acgacgacgacgaaaagccttggagggcaacatggaugacg

SEQ ID NO: 3257 - DNA, 51 bp, Artificial Sequence
  Description of Artificial Sequence: Synthetic primer
  Description of Combined DNA/RNA Molecule: Synthetic primer
acgacgacgacttgacgaacataatgccagaggctgaggatggttcctgcc

SEQ ID NO: 3258 - DNA, 51 bp, Artificial Sequence
  Description of Artificial Sequence: Synthetic oligonucleotide
  Description of Combined DNA/RNA Molecule: Synthetic oligonucleotide
tggaggccggagaaattaaacacacagcatcagccattccatcgcagggca

SEQ ID NO: 3259 - DNA, 44 bp, Artificial Sequence
  Description of Artificial Sequence: Synthetic oligonucleotide
gggtggagacacagtggcagcaggtttgggatctgggcatcaca

SEQ ID NO: 3260 - DNA, 25 bp, Artificial Sequence
  Description of Artificial Sequence: Synthetic probe
aacatcgcagggtggagacacagtg

SEQ ID NO: 3261 - DNA, 21 bp, Artificial Sequence
  Description of Artificial Sequence: Synthetic primer
tggaggccggagaaattaaac

SEQ ID NO: 3262 - DNA, 21 bp, Artificial Sequence
  Description of Artificial Sequence: Synthetic primer
tgtgatgcccagatcccaaac

SEQ ID NO: 3263 - DNA, 47 bp, Artificial Sequence
  Description of Artificial Sequence: Synthetic primer
  Description of Combined DNA/RNA Molecule: Synthetic primer
tgtgatgcccagatcccaaacgggctgaggatggttcctgttgccat

SEQ ID NO: 3264 - DNA, 37 bp, Artificial Sequence
  Description of Artificial Sequence: Synthetic primer
  Description of Combined DNA/RNA Molecule: Synthetic primer
acgacgacgacgaaggtccagaggagggcacagtggt

SEQ ID NO: 3265 - DNA, 37 bp, Artificial Sequence
  Description of Artificial Sequence: Synthetic primer
  Description of Combined DNA/RNA Molecule: Synthetic primer
acgacgacgacgaaagaggagggcacagtggcuctaa

SEQ ID NO: 3266 - DNA, 54 bp, Artificial Sequence
  Description of Artificial Sequence: Synthetic primer
  Description of Combined DNA/RNA Molecule: Synthetic primer
acgacgacgacttgacgaacataatgcctgtttgcccctgtgttaagtguggta

SEQ ID NO: 3267 - DNA, 50 bp, Artificial Sequence
  Description of Artificial Sequence: Synthetic oligonucleotide
  Description of Combined DNA/RNA Molecule: Synthetic oligonucleotide
ttgtctctgcgacccatcaagccacaggtccacagaggaaattcagccca

SEQ ID NO: 3268 - DNA, 42 bp, Artificial Sequence
  Description of Artificial Sequence: Synthetic oligonucleotide
gcctggccccaatttcccagctgttggtacacgttcggcaca

SEQ ID NO: 3269 - DNA, 28 bp, Artificial Sequence
  Description of Artificial Sequence: Synthetic probe
ttaaattcagcctggccccaatttccca

SEQ ID NO: 3270 - DNA, 20 bp, Artificial Sequence
  Description of Artificial Sequence: Synthetic primer
ttgtctctgcgacccatcaa

SEQ ID NO: 3271 - DNA, 19 bp, Artificial Sequence
  Description of Artificial Sequence: Synthetic primer
tgtgccgaacgtgtaccaa

SEQ ID NO: 3272 - DNA, 47 bp, Artificial Sequence
  Description of Artificial Sequence: Synthetic primer
  Description of Combined DNA/RNA Molecule: Synthetic primer
tgtgccgaacgtgtaccaagcccctgtgttaagtgtggtgatgccaa

SEQ ID NO: 3273 - DNA, 46 bp, Artificial Sequence
  Description of Artificial Sequence: Synthetic primer
  Description of Combined DNA/RNA Molecule: Synthetic primer
acgacgacgacgaaattgaatcaatgctgtccctgtccacaccacc

SEQ ID NO: 3274 - DNA, 50 bp, Artificial Sequence
  Description of Artificial Sequence: Synthetic primer
  Description of Combined DNA/RNA Molecule: Synthetic primer
acgacgacgacttgacgaacataatgccctctgcttagccctggcugccg

SEQ ID NO: 3275 - DNA, 50 bp, Artificial Sequence
  Description of Artificial Sequence: Synthetic oligonucleotide
  Description of Combined DNA/RNA Molecule: Synthetic oligonucleotide
tggataaactaagtccgcccacctgcaatgccaccctttgttacacacgt

SEQ ID NO: 3276 - DNA, 45 bp, Artificial Sequence
  Description of Artificial Sequence: Synthetic oligonucleotide
cacaccacccccagcaagctgctggtgactgagcgacgtctaaca

SEQ ID NO: 3277 - DNA, 25 bp, Artificial Sequence
  Description of Artificial Sequence: Synthetic probe
aatgttacacacaccacccccagca

SEQ ID NO: 3278 - DNA, 22 bp, Artificial Sequence
  Description of Artificial Sequence: Synthetic primer
tggataaactaagtccgcccac

SEQ ID NO: 3279 - DNA, 21 bp, Artificial Sequence
  Description of Artificial Sequence: Synthetic primer
tgttagacgtcgctcagtcac

SEQ ID NO: 3280 - DNA, 46 bp, Artificial Sequence
  Description of Artificial Sequence: Synthetic primer
  Description of Combined DNA/RNA Molecule: Synthetic primer
tgttagacgtcgctcagtcacccctctgcttagccctggttgccaa

SEQ ID NO: 3281 - DNA, 43 bp, Artificial Sequence
  Description of Artificial Sequence: Synthetic primer
  Description of Combined DNA/RNA Molecule: Synthetic primer
acgacgacgacgaagctccacactcttcaatgccagcaccaga

SEQ ID NO: 3282 - DNA, 42 bp, Artificial Sequence
  Description of Artificial Sequence: Synthetic primer
  Description of Combined DNA/RNA Molecule: Synthetic primer
acgacgacgacgaacactggcctgctccacactcttcaatgt

SEQ ID NO: 3283 - DNA, 52 bp, Artificial Sequence
  Description of Artificial Sequence: Synthetic primer
  Description of Combined DNA/RNA Molecule: Synthetic primer
acgacgacgacttgacgaacataatggtgttccccatggcaggaaccucctg

SEQ ID NO: 3284 - DNA, 45 bp, Artificial Sequence
  Description of Artificial Sequence: Synthetic oligonucleotide
  Description of Combined DNA/RNA Molecule: Synthetic oligonucleotide
tcctgaattggccacaccacggcactcaccctgcagaacaucctg

SEQ ID NO: 3285 - DNA, 48 bp, Artificial Sequence
  Description of Artificial Sequence: Synthetic oligonucleotide
tcccacctctcaaagagaggtgtgaccgtgactgagcgacgtctaaca

SEQ ID NO: 3286 - DNA, 29 bp, Artificial Sequence
  Description of Artificial Sequence: Synthetic probe
aacagaacatcccacctctcaaagagagg

SEQ ID NO: 3287 - DNA, 20 bp, Artificial Sequence
  Description of Artificial Sequence: Synthetic primer
tcctgaattggccacaccac

SEQ ID NO: 3288 - DNA, 21 bp, Artificial Sequence
  Description of Artificial Sequence: Synthetic primer
tgttagacgtcgctcagtcac

SEQ ID NO: 3289 - DNA, 55 bp, Artificial Sequence
  Description of Artificial Sequence: Synthetic primer
  Description of Combined DNA/RNA Molecule: Synthetic primer
tgttagacgtcgctcagtcaccatggcaggaacctcctatctaaacttatgggtt

SEQ ID NO: 3290 - DNA, 37 bp, Artificial Sequence
  Description of Artificial Sequence: Synthetic primer
  Description of Combined DNA/RNA Molecule: Synthetic primer
acgacgacgacgaaagaggagggctggaggcacccaa

SEQ ID NO: 3291 - DNA, 54 bp, Artificial Sequence
  Description of Artificial Sequence: Synthetic primer
  Description of Combined DNA/RNA Molecule: Synthetic primer
acgacgacgacttgacgaacataatgctgtgctgtgggtaagtttgggcugtgg

SEQ ID NO: 3292 - DNA, 48 bp, Artificial Sequence
  Description of Artificial Sequence: Synthetic oligonucleotide
  Description of Combined DNA/RNA Molecule: Synthetic oligonucleotide
ttcttgcggttctggaacaccccagcatgaggcttttacaacagcagt

SEQ ID NO: 3293 - DNA, 40 bp, Artificial Sequence
  Description of Artificial Sequence: Synthetic oligonucleotide
accctcccccagccaccccgtgatgctccgttgttgctaa

SEQ ID NO: 3294 - DNA, 25 bp, Artificial Sequence
  Description of Artificial Sequence: Synthetic probe
aatacaacaaccctcccccagccac

SEQ ID NO: 3295 - DNA, 20 bp, Artificial Sequence
  Description of Artificial Sequence: Synthetic primer
ttcttgcggttctggaacac

SEQ ID NO: 3296 - DNA, 21 bp, Artificial Sequence
  Description of Artificial Sequence: Synthetic primer
ttagcaacaacggagcatcac

SEQ ID NO: 3297 - DNA, 50 bp, Artificial Sequence
  Description of Artificial Sequence: Synthetic primer
  Description of Combined DNA/RNA Molecule: Synthetic primer
ttagcaacaacggagcatcacgtgctgtgggtaagtttgggctatgatag

SEQ ID NO: 3298 - DNA, 39 bp, Artificial Sequence
  Description of Artificial Sequence: Synthetic primer
  Description of Combined DNA/RNA Molecule: Synthetic primer
acgacgacgacgaagcactagaggcacaggagcacagtt

SEQ ID NO: 3299 - DNA, 41 bp, Artificial Sequence
  Description of Artificial Sequence: Synthetic primer
  Description of Combined DNA/RNA Molecule: Synthetic primer
acgacgacgacgaacaggagcactagaggcacaggagcacg

SEQ ID NO: 3300 - DNA, 49 bp, Artificial Sequence
  Description of Artificial Sequence: Synthetic primer
  Description of Combined DNA/RNA Molecule: Synthetic primer
acgacgacgacttgacgaacataattggtgtcctgccccttgccctcaa

SEQ ID NO: 3301 - DNA, 49 bp, Artificial Sequence
  Description of Artificial Sequence: Synthetic oligonucleotide
  Description of Combined DNA/RNA Molecule: Synthetic oligonucleotide
tatggtaaaatgtcagcggcacgtcactgcaggtccacatgacaugctt

SEQ ID NO: 3302 - DNA, 48 bp, Artificial Sequence
  Description of Artificial Sequence: Synthetic oligonucleotide
tgcccaggagaccctaaagaccatcaggtgatgctccgttgttgctaa

SEQ ID NO: 3303 - DNA, 29 bp, Artificial Sequence
  Description of Artificial Sequence: Synthetic probe
ttcatgacatgcccaggagaccctaaaga

SEQ ID NO: 3304 - DNA, 22 bp, Artificial Sequence
  Description of Artificial Sequence: Synthetic primer
tatggtaaaatgtcagcggcac

SEQ ID NO: 3305 - DNA, 21 bp, Artificial Sequence
  Description of Artificial Sequence: Synthetic primer
ttagcaacaacggagcatcac

SEQ ID NO: 3306 - DNA, 45 bp, Artificial Sequence
  Description of Artificial Sequence: Synthetic primer
  Description of Combined DNA/RNA Molecule: Synthetic primer
ttagcaacaacggagcatcacccctcagcccccacctggtggtcc

SEQ ID NO: 3307 - DNA, 41 bp, Artificial Sequence
  Description of Artificial Sequence: Synthetic primer
  Description of Combined DNA/RNA Molecule: Synthetic primer
acgacgacgacgaaagacacagactcacaggcagcagttga

SEQ ID NO: 3308 - DNA, 42 bp, Artificial Sequence
  Description of Artificial Sequence: Synthetic primer
  Description of Combined DNA/RNA Molecule: Synthetic primer
acgacgacgacgaaacacagactcacaggcagcagttggcat

SEQ ID NO: 3309 - DNA, 51 bp, Artificial Sequence
  Description of Artificial Sequence: Synthetic primer
  Description of Combined DNA/RNA Molecule: Synthetic primer
acgacgacgacttgacgaacataatggtggcagtctcagggtgcacuaaaa

SEQ ID NO: 3310 - DNA, 44 bp, Artificial Sequence
  Description of Artificial Sequence: Synthetic oligonucleotide
  Description of Combined DNA/RNA Molecule: Synthetic oligonucleotide
tcctcgagccgatgacacaggcaccaggcacacaaatcagccgg

SEQ ID NO: 3311 - DNA, 42 bp, Artificial Sequence
  Description of Artificial Sequence: Synthetic oligonucleotide
gccaagccctcctgctagccagctgtaacgtccgtgggctaa

SEQ ID NO: 3312 - DNA, 25 bp, Artificial Sequence
  Description of Artificial Sequence: Synthetic probe
ttcaaatcagccaagccctcctgct

SEQ ID NO: 3313 - DNA, 19 bp, Artificial Sequence
  Description of Artificial Sequence: Synthetic primer
tcctcgagccgatgacaca

SEQ ID NO: 3314 - DNA, 19 bp, Artificial Sequence
  Description of Artificial Sequence: Synthetic primer
ttagcccacggacgttaca

SEQ ID NO: 3315 - DNA, 46 bp, Artificial Sequence
  Description of Artificial Sequence: Synthetic primer
  Description of Combined DNA/RNA Molecule: Synthetic primer
ttagcccacggacgttacatcagggtgcactaaaggtgcttgaagt

SEQ ID NO: 3316 - DNA, 45 bp, Artificial Sequence
  Description of Artificial Sequence: Synthetic primer
  Description of Combined DNA/RNA Molecule: Synthetic primer
acgacgacgacgaacaagcagaaccacctacaaggaaccaagtgc

SEQ ID NO: 3317 - DNA, 46 bp, Artificial Sequence
  Description of Artificial Sequence: Synthetic primer
  Description of Combined DNA/RNA Molecule: Synthetic primer
acgacgacgacgaaagaaccacctacaaggaaccaagtgtccacag

SEQ ID NO: 3318 - DNA, 51 bp, Artificial Sequence
  Description of Artificial Sequence: Synthetic primer
  Description of Combined DNA/RNA Molecule: Synthetic primer
acgacgacgacttgacgaacataatgatccctgcttggctcctggagccta

SEQ ID NO: 3319 - DNA, 58 bp, Artificial Sequence
  Description of Artificial Sequence: Synthetic oligonucleotide
  Description of Combined DNA/RNA Molecule: Synthetic oligonucleotide
tactatcgtatcacgccgacaggaagcaaagaacatttctcctacctagaacacagtt

SEQ ID NO: 3320 - DNA, 48 bp, Artificial Sequence
  Description of Artificial Sequence: Synthetic oligonucleotide
cagccattttgcagaaggcacagtccaggtgtaacgtccgtgggctaa

SEQ ID NO: 3321 - DNA, 30 bp, Artificial Sequence
  Description of Artificial Sequence: Synthetic probe
tttagaacacagccattttgcagaaggcac

SEQ ID NO: 3322 - DNA, 21 bp, Artificial Sequence
  Description of Artificial Sequence: Synthetic primer
tactatcgtatcacgccgaca

SEQ ID NO: 3323 - DNA, 19 bp, Artificial Sequence
  Description of Artificial Sequence: Synthetic primer
ttagcccacggacgttaca

SEQ ID NO: 3324 - DNA, 43 bp, Artificial Sequence
  Description of Artificial Sequence: Synthetic primer
  Description of Combined DNA/RNA Molecule: Synthetic primer
ttagcccacggacgttacatgcttggctcctggagcttggacc

SEQ ID NO: 3325 - DNA, 41 bp, Artificial Sequence
  Description of Artificial Sequence: Synthetic primer
  Description of Combined DNA/RNA Molecule: Synthetic primer
acgacgacgacgaagctgggcctctaggagctgacagcacg

SEQ ID NO: 3326 - DNA, 41 bp, Artificial Sequence
  Description of Artificial Sequence: Synthetic primer
  Description of Combined DNA/RNA Molecule: Synthetic primer
acgacgacgacgaaggcctctaggagctgacagcacagagt

SEQ ID NO: 3327 - DNA, 57 bp, Artificial Sequence
  Description of Artificial Sequence: Synthetic primer
  Description of Combined DNA/RNA Molecule: Synthetic primer
acgacgacgacttgacgaacataatgctgtagtgaacaggatggtttctggcutcta

SEQ ID NO: 3328 - DNA, 51 bp, Artificial Sequence
  Description of Artificial Sequence: Synthetic oligonucleotide
  Description of Combined DNA/RNA Molecule: Synthetic oligonucleotide
ttgagaccgctgaccgacagtgaagacaatagctggatctctgacaucaat

SEQ ID NO: 3329 - DNA, 47 bp, Artificial Sequence
  Description of Artificial Sequence: Synthetic oligonucleotide
tcagcaagagacaatgggcccaccaaagtgttgcacggtcgagctaa

SEQ ID NO: 3330 - DNA, 28 bp, Artificial Sequence
  Description of Artificial Sequence: Synthetic probe
aatctgacatcagcaagagacaatgggc

SEQ ID NO: 3331 - DNA, 19 bp, Artificial Sequence
  Description of Artificial Sequence: Synthetic primer
ttgagaccgctgaccgaca

SEQ ID NO: 3332 - DNA, 19 bp, Artificial Sequence
  Description of Artificial Sequence: Synthetic primer
ttagctcgaccgtgcaaca

SEQ ID NO: 3333 - DNA, 49 bp, Artificial Sequence
  Description of Artificial Sequence: Synthetic primer
  Description of Combined DNA/RNA Molecule: Synthetic primer
ttagctcgaccgtgcaacaatggtttctggcttctggctttgatgggct

SEQ ID NO: 3334 - DNA, 46 bp, Artificial Sequence
  Description of Artificial Sequence: Synthetic primer
  Description of Combined DNA/RNA Molecule: Synthetic primer
acgacgacgacgaagacccttattcatcagcccacactacagccac

SEQ ID NO: 3335 - DNA, 46 bp, Artificial Sequence
  Description of Artificial Sequence: Synthetic primer
  Description of Combined DNA/RNA Molecule: Synthetic primer
acgacgacgacgaaccttattcatcagcccacactacagccatgtg

SEQ ID NO: 3336 - DNA, 50 bp, Artificial Sequence
  Description of Artificial Sequence: Synthetic primer
  Description of Combined DNA/RNA Molecule: Synthetic primer
acgacgacgacttgacgaacataatgtgtctgcaggctgaggctaggctt

SEQ ID NO: 3337 - DNA, 40 bp, Artificial Sequence
  Description of Artificial Sequence: Synthetic oligonucleotide
  Description of Combined DNA/RNA Molecule: Synthetic oligonucleotide
tcgcaacgtgccgaatacacccccagcccagctcagactc

SEQ ID NO: 3338 - DNA, 48 bp, Artificial Sequence
  Description of Artificial Sequence: Synthetic oligonucleotide
gacctgaggcatggtctgaaagccaggtctgttgcacggtcgagctaa

SEQ ID NO: 3339 - DNA, 31 bp, Artificial Sequence
  Description of Artificial Sequence: Synthetic probe
ttcagctcagacctgaggcatggtctgaaag

SEQ ID NO: 3340 - DNA, 19 bp, Artificial Sequence
  Description of Artificial Sequence: Synthetic primer
tcgcaacgtgccgaataca

SEQ ID NO: 3341 - DNA, 19 bp, Artificial Sequence
  Description of Artificial Sequence: Synthetic primer
ttagctcgaccgtgcaaca

SEQ ID NO: 3342 - DNA, 47 bp, Artificial Sequence
  Description of Artificial Sequence: Synthetic primer
  Description of Combined DNA/RNA Molecule: Synthetic primer
ttagctcgaccgtgcaacactcagaggacagggtgcagacttggctc

SEQ ID NO: 3343 - DNA, 45 bp, Artificial Sequence
  Description of Artificial Sequence: Synthetic primer
  Description of Combined DNA/RNA Molecule: Synthetic primer
acgacgacgacgaattgacaagttcttcacacaggcagcaccagt

SEQ ID NO: 3344 - DNA, 45 bp, Artificial Sequence
  Description of Artificial Sequence: Synthetic primer
  Description of Combined DNA/RNA Molecule: Synthetic primer
acgacgacgacgaagacaagttcttcacacaggcagcaccagcat

SEQ ID NO: 3345 - DNA, 57 bp, Artificial Sequence
  Description of Artificial Sequence: Synthetic primer
  Description of Combined DNA/RNA Molecule: Synthetic primer
acgacgacgacttgacgaacataatgcatgaagttgaggttcatgtaggtgaagcct

SEQ ID NO: 3346 - DNA, 46 bp, Artificial Sequence
  Description of Artificial Sequence: Synthetic oligonucleotide
  Description of Combined DNA/RNA Molecule: Synthetic oligonucleotide
taacgggattgagagtggacagcactgacccctccagatcacctga

SEQ ID NO: 3347 - DNA, 45 bp, Artificial Sequence
  Description of Artificial Sequence: Synthetic oligonucleotide
cctagtcctggccagcatcaaccaggtgtctgccgcccttactaa

SEQ ID NO: 3348 - DNA, 29 bp, Artificial Sequence
  Description of Artificial Sequence: Synthetic probe
aacagatcacctagtcctggccagcatca

SEQ ID NO: 3349 - DNA, 21 bp, Artificial Sequence
  Description of Artificial Sequence: Synthetic primer
taacgggattgagagtggaca

SEQ ID NO: 3350 - DNA, 19 bp, Artificial Sequence
  Description of Artificial Sequence: Synthetic primer
ttagtaagggcggcagaca

SEQ ID NO: 3351 - DNA, 52 bp, Artificial Sequence
  Description of Artificial Sequence: Synthetic primer
  Description of Combined DNA/RNA Molecule: Synthetic primer
ttagtaagggcggcagacaggttcatgtaggtgaagccctggaaactggccc

SEQ ID NO: 3352 - DNA, 38 bp, Artificial Sequence
  Description of Artificial Sequence: Synthetic primer
  Description of Combined DNA/RNA Molecule: Synthetic primer
acgacgacgacgaagagggcttgcctcaccccagtccg

SEQ ID NO: 3353 - DNA, 39 bp, Artificial Sequence
  Description of Artificial Sequence: Synthetic primer
  Description of Combined DNA/RNA Molecule: Synthetic primer
acgacgacgacgaaccaggagggcttgcctcaccccagc

SEQ ID NO: 3354 - DNA, 52 bp, Artificial Sequence
  Description of Artificial Sequence: Synthetic primer
  Description of Combined DNA/RNA Molecule: Synthetic primer
acgacgacgacttgacgaacataatgtgagtgccctcactttgaggagacaa

SEQ ID NO: 3355 - DNA, 52 bp, Artificial Sequence
  Description of Artificial Sequence: Synthetic oligonucleotide
  Description of Combined DNA/RNA Molecule: Synthetic oligonucleotide
taacgggattgagagtggacacaggatctctgccttcagttgaaacacagtg

SEQ ID NO: 3356 - DNA, 42 bp, Artificial Sequence
  Description of Artificial Sequence: Synthetic oligonucleotide
cagcacccccagccatccacaggtgtctgccgcccttactaa

SEQ ID NO: 3357 - DNA, 27 bp, Artificial Sequence
  Description of Artificial Sequence: Synthetic probe
aatgaaacacagcacccccagccatcc

SEQ ID NO: 3358 - DNA, 21 bp, Artificial Sequence
  Description of Artificial Sequence: Synthetic primer
taacgggattgagagtggaca

SEQ ID NO: 3359 - DNA, 19 bp, Artificial Sequence
  Description of Artificial Sequence: Synthetic primer
ttagtaagggcggcagaca

SEQ ID NO: 3360 - DNA, 49 bp, Artificial Sequence
  Description of Artificial Sequence: Synthetic primer
  Description of Combined DNA/RNA Molecule: Synthetic primer
ttagtaagggcggcagacactcactttgaggagacagaggtgctggata

SEQ ID NO: 3361 - DNA, 44 bp, Artificial Sequence
  Description of Artificial Sequence: Synthetic primer
  Description of Combined DNA/RNA Molecule: Synthetic primer
acgacgacgacgaacaccaggtcatcacactgaccttcaagaaa

SEQ ID NO: 3362 - DNA, 46 bp, Artificial Sequence
  Description of Artificial Sequence: Synthetic primer
  Description of Combined DNA/RNA Molecule: Synthetic primer
acgacgacgacgaaccaggtcatcacactgaccttcaagaagttta

SEQ ID NO: 3363 - DNA, 51 bp, Artificial Sequence
  Description of Artificial Sequence: Synthetic primer
  Description of Combined DNA/RNA Molecule: Synthetic primer
acgacgacgacttgacgaacataatgaacttccccagcctctgggagttgc

SEQ ID NO: 3364 - DNA, 46 bp, Artificial Sequence
  Description of Artificial Sequence: Synthetic oligonucleotide
  Description of Combined DNA/RNA Molecule: Synthetic oligonucleotide
ttggtacgaggagggcacatggagccagacacctactgtcactaca

SEQ ID NO: 3365 - DNA, 55 bp, Artificial Sequence
  Description of Artificial Sequence: Synthetic oligonucleotide
ctatgactcagtcagcatgttcaacagagccatgagtgtctgccgcccttactaa

SEQ ID NO: 3366 - DNA, 37 bp, Artificial Sequence
  Description of Artificial Sequence: Synthetic probe
aaactgtcactatgactcagtcagcatgttcaacaga

SEQ ID NO: 3367 - DNA, 19 bp, Artificial Sequence
  Description of Artificial Sequence: Synthetic primer
ttggtacgaggagggcaca

SEQ ID NO: 3368 - DNA, 19 bp, Artificial Sequence
  Description of Artificial Sequence: Synthetic primer
ttagtaagggcggcagaca

SEQ ID NO: 3369 - DNA, 48 bp, Artificial Sequence
  Description of Artificial Sequence: Synthetic primer
  Description of Combined DNA/RNA Molecule: Synthetic primer
ttagtaagggcggcagacacagcctctgggagttgttgctcgtggctt

SEQ ID NO: 3370 - DNA, 40 bp, Artificial Sequence
  Description of Artificial Sequence: Synthetic primer
  Description of Combined DNA/RNA Molecule: Synthetic primer
acgacgacgacgaacttcctgggaggtggtgctcacaaat

SEQ ID NO: 3371 - DNA, 42 bp, Artificial Sequence
  Description of Artificial Sequence: Synthetic primer
  Description of Combined DNA/RNA Molecule: Synthetic primer
acgacgacgacgaacctgggaggtggtgctcacaaacctggt

SEQ ID NO: 3372 - DNA, 50 bp, Artificial Sequence
  Description of Artificial Sequence: Synthetic primer
  Description of Combined DNA/RNA Molecule: Synthetic primer
acgacgacgacttgacgaacataatctgagcatgtgaggtgaggactgga

SEQ ID NO: 3373 - DNA, 47 bp, Artificial Sequence
  Description of Artificial Sequence: Synthetic oligonucleotide
  Description of Combined DNA/RNA Molecule: Synthetic oligonucleotide
tcagacgcactaaacaggcaagcatgccttccctggcagccacagga

SEQ ID NO: 3374 - DNA, 43 bp, Artificial Sequence
  Description of Artificial Sequence: Synthetic oligonucleotide
cagaggagaaggctgagggacccattgcggatcgtcgtgtgaa

SEQ ID NO: 3375 - DNA, 24 bp, Artificial Sequence
  Description of Artificial Sequence: Synthetic probe
aagcagccacagaggagaaggctg

SEQ ID NO: 3376 - DNA, 21 bp, Artificial Sequence
  Description of Artificial Sequence: Synthetic primer
tcagacgcactaaacaggcaa

SEQ ID NO: 3377 - DNA, 19 bp, Artificial Sequence
  Description of Artificial Sequence: Synthetic primer
ttcacacgacgatccgcaa

SEQ ID NO: 3378 - DNA, 44 bp, Artificial Sequence
  Description of Artificial Sequence: Synthetic primer
  Description of Combined DNA/RNA Molecule: Synthetic primer
ttcacacgacgatccgcaagagcatgtgaggtgaggattgggtt

SEQ ID NO: 3379 - DNA, 42 bp, Artificial Sequence
  Description of Artificial Sequence: Synthetic primer
  Description of Combined DNA/RNA Molecule: Synthetic primer
acgacgacgacgaaatccagtcatgctgaggtccccaacctc

SEQ ID NO: 3380 - DNA, 42 bp, Artificial Sequence
  Description of Artificial Sequence: Synthetic primer
  Description of Combined DNA/RNA Molecule: Synthetic primer
acgacgacgacgaacagcagtgcagacccatccagtcatgcc

SEQ ID NO: 3381 - DNA, 48 bp, Artificial Sequence
  Description of Artificial Sequence: Synthetic primer
  Description of Combined DNA/RNA Molecule: Synthetic primer
acgacgacgacttgacgaacataatgaggcagaggcagtggcagtgta

SEQ ID NO: 3382 - DNA, 50 bp, Artificial Sequence
  Description of Artificial Sequence: Synthetic oligonucleotide
  Description of Combined DNA/RNA Molecule: Synthetic oligonucleotide
ttccatcgagcgccaacaattacccacattttcctttctccctcacccgt

SEQ ID NO: 3383 - DNA, 39 bp, Artificial Sequence
  Description of Artificial Sequence: Synthetic oligonucleotide
cccacagcacagccccacccttgcggatcgtcgtgtgaa

SEQ ID NO: 3384 - DNA, 23 bp, Artificial Sequence
  Description of Artificial Sequence: Synthetic probe
aatccctcacccacagcacagcc

SEQ ID NO: 3385 - DNA, 19 bp, Artificial Sequence
  Description of Artificial Sequence: Synthetic primer
ttccatcgagcgccaacaa

SEQ ID NO: 3386 - DNA, 19 bp, Artificial Sequence
  Description of Artificial Sequence: Synthetic primer
ttcacacgacgatccgcaa

SEQ ID NO: 3387 - DNA, 44 bp, Artificial Sequence
  Description of Artificial Sequence: Synthetic primer
  Description of Combined DNA/RNA Molecule: Synthetic primer
ttcacacgacgatccgcaaggcagaggcagtggcagtatgggat

SEQ ID NO: 3388 - DNA, 37 bp, Artificial Sequence
  Description of Artificial Sequence: Synthetic primer
  Description of Combined DNA/RNA Molecule: Synthetic primer
acgacgacgacgaagggagccagcagaggccautgga

SEQ ID NO: 3389 - DNA, 39 bp, Artificial Sequence
  Description of Artificial Sequence: Synthetic primer
  Description of Combined DNA/RNA Molecule: Synthetic primer
acgacgacgacgaagagccagcagaggccattgggggac

SEQ ID NO: 3390 - DNA, 56 bp, Artificial Sequence
  Description of Artificial Sequence: Synthetic primer
  Description of Combined DNA/RNA Molecule: Synthetic primer
acgacgacgacttgacgaacataattgagggagaaaggaaaatgtgggtaaggtta

SEQ ID NO: 3391 - DNA, 51 bp, Artificial Sequence
  Description of Artificial Sequence: Synthetic oligonucleotide
  Description of Combined DNA/RNA Molecule: Synthetic oligonucleotide
ttcagagcacctgcgtaccgcaaggacttgcttctgagaggaggcauggac

SEQ ID NO: 3392 - DNA, 45 bp, Artificial Sequence
  Description of Artificial Sequence: Synthetic oligonucleotide
tgggtctcagcagtgcagacccatccggttcttcggctggctcaa

SEQ ID NO: 3393 - DNA, 25 bp, Artificial Sequence
  Description of Artificial Sequence: Synthetic probe
ttggaggcatgggtctcagcagtgc

SEQ ID NO: 3394 - DNA, 19 bp, Artificial Sequence
  Description of Artificial Sequence: Synthetic primer
ttcagagcacctgcgtacc

SEQ ID NO: 3395 - DNA, 19 bp, Artificial Sequence
  Description of Artificial Sequence: Synthetic primer
ttgagccagccgaagaacc

SEQ ID NO: 3396 - DNA, 46 bp, Artificial Sequence
  Description of Artificial Sequence: Synthetic primer
  Description of Combined DNA/RNA Molecule: Synthetic primer
ttgagccagccgaagaaccgaggacctcagcatgactgggtgggaa

SEQ ID NO: 3397 - DNA, 40 bp, Artificial Sequence
  Description of Artificial Sequence: Synthetic primer
  Description of Combined DNA/RNA Molecule: Synthetic primer
acgacgacgacgaacacagcactgtggtcagtgcaggcac

SEQ ID NO: 3398 - DNA, 37 bp, Artificial Sequence
  Description of Artificial Sequence: Synthetic primer
  Description of Combined DNA/RNA Molecule: Synthetic primer
acgacgacgacgaactggccaggccacagcacugtga

SEQ ID NO: 3399 - DNA, 52 bp, Artificial Sequence
  Description of Artificial Sequence: Synthetic primer
  Description of Combined DNA/RNA Molecule: Synthetic primer
acgacgacgacttgacgaacataatggtgagaagatggcagcctggcutacc

SEQ ID NO: 3400 - DNA, 43 bp, Artificial Sequence
  Description of Artificial Sequence: Synthetic oligonucleotide
  Description of Combined DNA/RNA Molecule: Synthetic oligonucleotide
tctcaatgtcgagccgtacccatggcagaggcaggacagcccc

SEQ ID NO: 3401 - DNA, 49 bp, Artificial Sequence
  Description of Artificial Sequence: Synthetic oligonucleotide
gccttatcactcagctctcccacctacaccggttcttcggctggctcaa

SEQ ID NO: 3402 - DNA, 30 bp, Artificial Sequence
  Description of Artificial Sequence: Synthetic probe
ttcaggacagccttatcactcagctctccc

SEQ ID NO: 3403 - DNA, 20 bp, Artificial Sequence
  Description of Artificial Sequence: Synthetic primer
tctcaatgtcgagccgtacc

SEQ ID NO: 3404 - DNA, 19 bp, Artificial Sequence
  Description of Artificial Sequence: Synthetic primer
ttgagccagccgaagaacc

SEQ ID NO: 3405 - DNA, 46 bp, Artificial Sequence
  Description of Artificial Sequence: Synthetic primer
  Description of Combined DNA/RNA Molecule: Synthetic primer
ttgagccagccgaagaaccggcttactctgcagtgggagatgtaga

SEQ ID NO: 3406 - DNA, 49 bp, Artificial Sequence
  Description of Artificial Sequence: Synthetic primer
  Description of Combined DNA/RNA Molecule: Synthetic primer
acgacgacgacgaacactgataacacatgtgcaaaagagacacagggct

SEQ ID NO: 3407 - DNA, 48 bp, Artificial Sequence
  Description of Artificial Sequence: Synthetic primer
  Description of Combined DNA/RNA Molecule: Synthetic primer
acgacgacgacgaacacaccactgataacacatgtgcaaaagagacat

SEQ ID NO: 3408 - DNA, 52 bp, Artificial Sequence
  Description of Artificial Sequence: Synthetic primer
  Description of Combined DNA/RNA Molecule: Synthetic primer
acgacgacgacttgacgaacataatggcagaggtgtgtgtctgtgtcaagta

SEQ ID NO: 3409 - DNA, 51 bp, Artificial Sequence
  Description of Artificial Sequence: Synthetic oligonucleotide
  Description of Combined DNA/RNA Molecule: Synthetic oligonucleotide
tttcgctcgacgcataccaccagtcagctttctccacactcaggcacacgt

SEQ ID NO: 3410 - DNA, 46 bp, Artificial Sequence
  Description of Artificial Sequence: Synthetic oligonucleotide
cacaccctaactgtcaggcactcccactggcgcggctactgtaaaa

SEQ ID NO: 3411 - DNA, 27 bp, Artificial Sequence
  Description of Artificial Sequence: Synthetic probe
tttcaggcacacaccctaactgtcagg

SEQ ID NO: 3412 - DNA, 19 bp, Artificial Sequence
  Description of Artificial Sequence: Synthetic primer
tttcgctcgacgcatacca

SEQ ID NO: 3413 - DNA, 19 bp, Artificial Sequence
  Description of Artificial Sequence: Synthetic primer
ttttacagtagccgcgcca

SEQ ID NO: 3414 - DNA, 49 bp, Artificial Sequence
  Description of Artificial Sequence: Synthetic primer
  Description of Combined DNA/RNA Molecule: Synthetic primer
ttttacagtagccgcgccagtgtgtgtctgtgtcaagtgggaatgccta

SEQ ID NO: 3415 - DNA, 40 bp, Artificial Sequence
  Description of Artificial Sequence: Synthetic primer
  Description of Combined DNA/RNA Molecule: Synthetic primer
acgacgacgacgaacctgccccagtttgggagtcagcttt

SEQ ID NO: 3416 - DNA, 39 bp, Artificial Sequence
  Description of Artificial Sequence: Synthetic primer
  Description of Combined DNA/RNA Molecule: Synthetic primer
acgacgacgacgaagccccagtttgggagtcagcutccc

SEQ ID NO: 3417 - DNA, 49 bp, Artificial Sequence
  Description of Artificial Sequence: Synthetic primer
  Description of Combined DNA/RNA Molecule: Synthetic primer
acgacgacgacttgacgaacataatgcctgaggtgtgcagcctcuggta

SEQ ID NO: 3418 - DNA, 48 bp, Artificial Sequence
  Description of Artificial Sequence: Synthetic oligonucleotide
  Description of Combined DNA/RNA Molecule: Synthetic oligonucleotide
ttcttgcccgcttgttccacctgcaaagcactgactgaagacaucaag

SEQ ID NO: 3419 - DNA, 46 bp, Artificial Sequence
  Description of Artificial Sequence: Synthetic oligonucleotide
tcagaccaaggccccaggaggaaacagtggcgcggctactgtaaaa

SEQ ID NO: 3420 - DNA, 27 bp, Artificial Sequence
  Description of Artificial Sequence: Synthetic probe
aagaagacatcagaccaaggccccagg

SEQ ID NO: 3421 - DNA, 19 bp, Artificial Sequence
  Description of Artificial Sequence: Synthetic primer
ttcttgcccgcttgttcca

SEQ ID NO: 3422 - DNA, 19 bp, Artificial Sequence
  Description of Artificial Sequence: Synthetic primer
ttttacagtagccgcgcca

SEQ ID NO: 3423 - DNA, 47 bp, Artificial Sequence
  Description of Artificial Sequence: Synthetic primer
  Description of Combined DNA/RNA Molecule: Synthetic primer
ttttacagtagccgcgccacctctggtgctagccttgttcttgaatc

SEQ ID NO: 3424 - DNA, 42 bp, Artificial Sequence
  Description of Artificial Sequence: Synthetic primer
  Description of Combined DNA/RNA Molecule: Synthetic primer
acgacgacgacgaacagtccctcccaaatccaaggcagtgaa

SEQ ID NO: 3425 - DNA, 42 bp, Artificial Sequence
  Description of Artificial Sequence: Synthetic primer
  Description of Combined DNA/RNA Molecule: Synthetic primer
acgacgacgacgaagtccctcccaaatccaaggcagtgagta

SEQ ID NO: 3426 - DNA, 50 bp, Artificial Sequence
  Description of Artificial Sequence: Synthetic primer
  Description of Combined DNA/RNA Molecule: Synthetic primer
acgacgacgacttgacgaacataatcatactctgaggctgaggcccaggg

SEQ ID NO: 3427 - DNA, 44 bp, Artificial Sequence
  Description of Artificial Sequence: Synthetic oligonucleotide
  Description of Combined DNA/RNA Molecule: Synthetic oligonucleotide
tcccttagagagaacgcccagtgagcacactggaggtcaagttt

SEQ ID NO: 3428 - DNA, 43 bp, Artificial Sequence
  Description of Artificial Sequence: Synthetic oligonucleotide
agtcccaggtccagccagggctggtgacgtacgagtgttctta

SEQ ID NO: 3429 - DNA, 24 bp, Artificial Sequence
  Description of Artificial Sequence: Synthetic probe
aagaggtcaagtcccaggtccagc

SEQ ID NO: 3430 - DNA, 20 bp, Artificial Sequence
  Description of Artificial Sequence: Synthetic primer
tcccttagagagaacgccca

SEQ ID NO: 3431 - DNA, 22 bp, Artificial Sequence
  Description of Artificial Sequence: Synthetic primer
taagaacactcgtacgtcacca

SEQ ID NO: 3432 - DNA, 46 bp, Artificial Sequence
  Description of Artificial Sequence: Synthetic primer
  Description of Combined DNA/RNA Molecule: Synthetic primer
taagaacactcgtacgtcaccaggctgaggcccaggagagtgggcc

SEQ ID NO: 3433 - DNA, 47 bp, Artificial Sequence
  Description of Artificial Sequence: Synthetic primer
  Description of Combined DNA/RNA Molecule: Synthetic primer
acgacgacgacgaacaagctggttagcatcatctccaagacagtggc

SEQ ID NO: 3434 - DNA, 47 bp, Artificial Sequence
  Description of Artificial Sequence: Synthetic primer
  Description of Combined DNA/RNA Molecule: Synthetic primer
acgacgacgacgaagctggttagcatcatctccaagacagtggtgcc

SEQ ID NO: 3435 - DNA, 55 bp, Artificial Sequence
  Description of Artificial Sequence: Synthetic primer
  Description of Combined DNA/RNA Molecule: Synthetic primer
acgacgacgacttgacgaacataatgtggcagtgtgaagtgtggtgtgtcugtgg

SEQ ID NO: 3436 - DNA, 44 bp, Artificial Sequence
  Description of Artificial Sequence: Synthetic oligonucleotide
  Description of Combined DNA/RNA Molecule: Synthetic oligonucleotide
tctcataccagacgcggtaacgctgaggctggcactacaccatg

SEQ ID NO: 3437 - DNA, 41 bp, Artificial Sequence
  Description of Artificial Sequence: Synthetic oligonucleotide
ccacaagggcccagcaccactggttcgtgtcgctgtgctta

SEQ ID NO: 3438 - DNA, 26 bp, Artificial Sequence
  Description of Artificial Sequence: Synthetic probe
ttcactacaccacaagggcccagcac

SEQ ID NO: 3439 - DNA, 21 bp, Artificial Sequence
  Description of Artificial Sequence: Synthetic primer
tctcataccagacgcggtaac

SEQ ID NO: 3440 - DNA, 19 bp, Artificial Sequence
  Description of Artificial Sequence: Synthetic primer
taagcacagcgacacgaac

SEQ ID NO: 3441 - DNA, 48 bp, Artificial Sequence
  Description of Artificial Sequence: Synthetic primer
  Description of Combined DNA/RNA Molecule: Synthetic primer
taagcacagcgacacgaacggcagtgtgaagtgtggtgtgtatgtgaa

SEQ ID NO: 3442 - DNA, 38 bp, Artificial Sequence
  Description of Artificial Sequence: Synthetic primer
  Description of Combined DNA/RNA Molecule: Synthetic primer
acgacgacgacgaagcctcccctccagatgccagcagt

SEQ ID NO: 3443 - DNA, 38 bp, Artificial Sequence
  Description of Artificial Sequence: Synthetic primer
  Description of Combined DNA/RNA Molecule: Synthetic primer
acgacgacgacgaaccctccagatgccagcagcaccaa

SEQ ID NO: 3444 - DNA, 52 bp, Artificial Sequence
  Description of Artificial Sequence: Synthetic primer
  Description of Combined DNA/RNA Molecule: Synthetic primer
acgacgacgacttgacgaacataatcctgggagctgtgctctgtgtcuggga

SEQ ID NO: 3445 - DNA, 41 bp, Artificial Sequence
  Description of Artificial Sequence: Synthetic oligonucleotide
  Description of Combined DNA/RNA Molecule: Synthetic oligonucleotide
ttttcggcggcagctaaacgcctgcatgaggccgcaaggcc

SEQ ID NO: 3446 - DNA, 47 bp, Artificial Sequence
  Description of Artificial Sequence: Synthetic oligonucleotide
aggtttgcagtgacatcccccaagcttcgttcgtgtcgctgtgctta

SEQ ID NO: 3447 - DNA, 26 bp, Artificial Sequence
  Description of Artificial Sequence: Synthetic probe
ttggccgcaaggtttgcagtgacatc

SEQ ID NO: 3448 - DNA, 19 bp, Artificial Sequence
  Description of Artificial Sequence: Synthetic primer
ttttcggcggcagctaaac

SEQ ID NO: 3449 - DNA, 19 bp, Artificial Sequence
  Description of Artificial Sequence: Synthetic primer
taagcacagcgacacgaac

SEQ ID NO: 3450 - DNA, 45 bp, Artificial Sequence
  Description of Artificial Sequence: Synthetic primer
  Description of Combined DNA/RNA Molecule: Synthetic primer
taagcacagcgacacgaacctgaggcaggtcaggaagcctgggag

SEQ ID NO: 3451 - DNA, 45 bp, Artificial Sequence
  Description of Artificial Sequence: Synthetic primer
  Description of Combined DNA/RNA Molecule: Synthetic primer
acgacgacgacgaaatgcagcaagcaattctccacatccaaggct

SEQ ID NO: 3452 - DNA, 44 bp, Artificial Sequence
  Description of Artificial Sequence: Synthetic primer
  Description of Combined DNA/RNA Molecule: Synthetic primer
acgacgacgacgaacaagcaattctccacatccaaggccagttc

SEQ ID NO: 3453 - DNA, 51 bp, Artificial Sequence
  Description of Artificial Sequence: Synthetic primer
  Description of Combined DNA/RNA Molecule: Synthetic primer
acgacgacgacttgacgaacataatagctgggcctcatccttgtccuctta

SEQ ID NO: 3454 - DNA, 43 bp, Artificial Sequence
  Description of Artificial Sequence: Synthetic oligonucleotide
  Description of Combined DNA/RNA Molecule: Synthetic oligonucleotide
tccggaccttcatcctccacccctttgggcacccatcaccacc

SEQ ID NO: 3455 - DNA, 47 bp, Artificial Sequence
  Description of Artificial Sequence: Synthetic oligonucleotide
ccatttctcagcactgctggagcccagtgggcaggaacacgatagta

SEQ ID NO: 3456 - DNA, 29 bp, Artificial Sequence
  Description of Artificial Sequence: Synthetic probe
ttcccatcaccatttctcagcactgctgg

SEQ ID NO: 3457 - DNA, 19 bp, Artificial Sequence
  Description of Artificial Sequence: Synthetic primer
tccggaccttcatcctcca

SEQ ID NO: 3458 - DNA, 20 bp, Artificial Sequence
  Description of Artificial Sequence: Synthetic primer
tactatcgtgttcctgccca

SEQ ID NO: 3459 - DNA, 48 bp, Artificial Sequence
  Description of Artificial Sequence: Synthetic primer
  Description of Combined DNA/RNA Molecule: Synthetic primer
tactatcgtgttcctgcccagtcctcttggagggtgctgaaatggcta

SEQ ID NO: 3460 - DNA, 44 bp, Artificial Sequence
  Description of Artificial Sequence: Synthetic primer
  Description of Combined DNA/RNA Molecule: Synthetic primer
acgacgacgacgaaattccagccacatgattgacacacauaccg

SEQ ID NO: 3461 - DNA, 46 bp, Artificial Sequence
  Description of Artificial Sequence: Synthetic primer
  Description of Combined DNA/RNA Molecule: Synthetic primer
acgacgacgacgaattccagccacatgattgacacacataccagga

SEQ ID NO: 3462 - DNA, 56 bp, Artificial Sequence
  Description of Artificial Sequence: Synthetic primer
  Description of Combined DNA/RNA Molecule: Synthetic primer
acgacgacgacttgacgaacataatgcaaacatctgctttgatgtggtggcugtga

SEQ ID NO: 3463 - DNA, 40 bp, Artificial Sequence
  Description of Artificial Sequence: Synthetic oligonucleotide
  Description of Combined DNA/RNA Molecule: Synthetic oligonucleotide
ttagccgccaaacgtaccaagggcccccacccgcagcttt

SEQ ID NO: 3464 - DNA, 42 bp, Artificial Sequence
  Description of Artificial Sequence: Synthetic oligonucleotide
gctcccaccaccacccacccagtgggcaggaacacgatagta

SEQ ID NO: 3465 - DNA, 20 bp, Artificial Sequence
  Description of Artificial Sequence: Synthetic probe
ttacccgcagctcccaccac

SEQ ID NO: 3466 - DNA, 19 bp, Artificial Sequence
  Description of Artificial Sequence: Synthetic primer
ttagccgccaaacgtacca

SEQ ID NO: 3467 - DNA, 20 bp, Artificial Sequence
  Description of Artificial Sequence: Synthetic primer
tactatcgtgttcctgccca

SEQ ID NO: 3468 - DNA, 43 bp, Artificial Sequence
  Description of Artificial Sequence: Synthetic primer
  Description of Combined DNA/RNA Molecule: Synthetic primer
tactatcgtgttcctgcccagctgtgggctgggtggatggtga

SEQ ID NO: 3469 - DNA, 43 bp, Artificial Sequence
  Description of Artificial Sequence: Synthetic primer
  Description of Combined DNA/RNA Molecule: Synthetic primer
acgacgacgacgaagggtggaaagcagttctgcatccaugggc

SEQ ID NO: 3470 - DNA, 44 bp, Artificial Sequence
  Description of Artificial Sequence: Synthetic primer
  Description of Combined DNA/RNA Molecule: Synthetic primer
acgacgacgacgaaggaaagcagttctgcatccatgggtggagt

SEQ ID NO: 3471 - DNA, 53 bp, Artificial Sequence
  Description of Artificial Sequence: Synthetic primer
  Description of Combined DNA/RNA Molecule: Synthetic primer
acgacgacgacttgacgaacataatatccagaacctctgggtgctggaugcta

SEQ ID NO: 3472 - DNA, 44 bp, Artificial Sequence
  Description of Artificial Sequence: Synthetic oligonucleotide
  Description of Combined DNA/RNA Molecule: Synthetic oligonucleotide
tagcagctgaacaacccaaccccaccccttggctgatcacataa

SEQ ID NO: 3473 - DNA, 45 bp, Artificial Sequence
  Description of Artificial Sequence: Synthetic oligonucleotide
catggtgcccacacagtcccttcccgttgtatggtcggcatgcta

SEQ ID NO: 3474 - DNA, 27 bp, Artificial Sequence
  Description of Artificial Sequence: Synthetic probe
ttctgatcacatggtgcccacacagtc

SEQ ID NO: 3475 - DNA, 20 bp, Artificial Sequence
  Description of Artificial Sequence: Synthetic primer
tagcagctgaacaacccaac

SEQ ID NO: 3476 - DNA, 20 bp, Artificial Sequence
  Description of Artificial Sequence: Synthetic primer
tagcatgccgaccatacaac

SEQ ID NO: 3477 - DNA, 47 bp, Artificial Sequence
  Description of Artificial Sequence: Synthetic primer
  Description of Combined DNA/RNA Molecule: Synthetic primer
tagcatgccgaccatacaacccagaacctctgggtgctgggtgctga

SEQ ID NO: 3478 - DNA, 37 bp, Artificial Sequence
  Description of Artificial Sequence: Synthetic primer
  Description of Combined DNA/RNA Molecule: Synthetic primer
acgacgacgacgaatgagcagcccaggtgccacagcg

SEQ ID NO: 3479 - DNA, 36 bp, Artificial Sequence; identical to SEQ ID NO: 1560
  Description of Artificial Sequence: Synthetic primer
  Description of Combined DNA/RNA Molecule: Synthetic primer

SEQ ID NO: 3480 - DNA, 59 bp, Artificial Sequence
  Description of Artificial Sequence: Synthetic primer
  Description of Combined DNA/RNA Molecule: Synthetic primer
acgacgacgacttgacgaacataatcccaaaaaacaaggaattgtgggtgtgaaggtga

SEQ ID NO: 3481 - DNA, 45 bp, Artificial Sequence
  Description of Artificial Sequence: Synthetic oligonucleotide
  Description of Combined DNA/RNA Molecule: Synthetic oligonucleotide
tctgcccttcgcttcgaacgggcactgacaagtcccatcaagctt

SEQ ID NO: 3482 - DNA, 43 bp, Artificial Sequence
  Description of Artificial Sequence: Synthetic oligonucleotide
agccccaccacccaggttcaagggttgtatggtcggcatgcta

SEQ ID NO: 3483 - DNA, 23 bp, Artificial Sequence
  Description of Artificial Sequence: Synthetic probe
aacccatcaagccccaccaccca

SEQ ID NO: 3484 - DNA, 19 bp, Artificial Sequence
  Description of Artificial Sequence: Synthetic primer
tctgcccttcgcttcgaac

SEQ ID NO: 3485 - DNA, 20 bp, Artificial Sequence
  Description of Artificial Sequence: Synthetic primer
tagcatgccgaccatacaac

SEQ ID NO: 3486 - DNA, 54 bp, Artificial Sequence
  Description of Artificial Sequence: Synthetic primer
  Description of Combined DNA/RNA Molecule: Synthetic primer
tagcatgccgaccatacaacaaaaaacaaggaattgtgggtgtgaagatggccc

SEQ ID NO: 3487 - DNA, 41 bp, Artificial Sequence
  Description of Artificial Sequence: Synthetic primer
  Description of Combined DNA/RNA Molecule: Synthetic primer
acgacgacgacgaaggcattggcctctgattccccaucact

SEQ ID NO: 3488 - DNA, 42 bp, Artificial Sequence
  Description of Artificial Sequence: Synthetic primer
  Description of Combined DNA/RNA Molecule: Synthetic primer
acgacgacgacgaattggcctctgattccccatcacccagaa

SEQ ID NO: 3489 - DNA, 53 bp, Artificial Sequence
  Description of Artificial Sequence: Synthetic primer
  Description of Combined DNA/RNA Molecule: Synthetic primer
acgacgacgacttgacgaacataatcctatgctgcctacattgagggcctcat

SEQ ID NO: 3490 - DNA, 44 bp, Artificial Sequence
  Description of Artificial Sequence: Synthetic oligonucleotide
  Description of Combined DNA/RNA Molecule: Synthetic oligonucleotide
ttgcaaaccacccggacaaacccttttgaggccaagacactcgt

SEQ ID NO: 3491 - DNA, 50 bp, Artificial Sequence
  Description of Artificial Sequence: Synthetic oligonucleotide
ctcaccttcagccagtccccatagtggacattggtcagcatcgactccta

SEQ ID NO: 3492 - DNA, 29 bp, Artificial Sequence
  Description of Artificial Sequence: Synthetic probe
ttcaagacactcaccttcagccagtcccc

SEQ ID NO: 3493 - DNA, 19 bp, Artificial Sequence
  Description of Artificial Sequence: Synthetic primer
ttgcaaaccacccggacaa

SEQ ID NO: 3494 - DNA, 20 bp, Artificial Sequence
  Description of Artificial Sequence: Synthetic primer
taggagtcgatgctgaccaa

SEQ ID NO: 3495 - DNA, 51 bp, Artificial Sequence
  Description of Artificial Sequence: Synthetic primer
  Description of Combined DNA/RNA Molecule: Synthetic primer
taggagtcgatgctgaccaacctacattgagggctatgtccactgtgggaa

SEQ ID NO: 3496 - DNA, 39 bp, Artificial Sequence
  Description of Artificial Sequence: Synthetic primer
  Description of Combined DNA/RNA Molecule: Synthetic primer
acgacgacgacgaagcacagctgcccccatgtcaaaatg

SEQ ID NO: 3497 - DNA, 41 bp, Artificial Sequence
  Description of Artificial Sequence: Synthetic primer
  Description of Combined DNA/RNA Molecule: Synthetic primer
acgacgacgacgaacacagctgcccccatgtcaaaauacaa

SEQ ID NO: 3498 - DNA, 54 bp, Artificial Sequence
  Description of Artificial Sequence: Synthetic primer
  Description of Combined DNA/RNA Molecule: Synthetic primer
acgacgacgacttgacgaacataatcaagcttcttcccccactgcttcautcta

SEQ ID NO: 3499 - DNA, 46 bp, Artificial Sequence
  Description of Artificial Sequence: Synthetic oligonucleotide
  Description of Combined DNA/RNA Molecule: Synthetic oligonucleotide
ttgcaaaccacccggacaactgggatgtcaggcttcctacaagctg

SEQ ID NO: 3500 - DNA, 47 bp, Artificial Sequence
  Description of Artificial Sequence: Synthetic oligonucleotide
agccaggagtgaggaagcaacaaggacttggtcagcatcgactccta

SEQ ID NO: 3501 - DNA, 27 bp, Artificial Sequence
  Description of Artificial Sequence: Synthetic probe
aatcctacaagccaggagtgaggaagc

SEQ ID NO: 3502 - DNA, 19 bp, Artificial Sequence
  Description of Artificial Sequence: Synthetic primer
ttgcaaaccacccggacaa

SEQ ID NO: 3503 - DNA, 20 bp, Artificial Sequence
  Description of Artificial Sequence: Synthetic primer
taggagtcgatgctgaccaa

SEQ ID NO: 3504 - DNA, 49 bp, Artificial Sequence
  Description of Artificial Sequence: Synthetic primer
  Description of Combined DNA/RNA Molecule: Synthetic primer
taggagtcgatgctgaccaacccccactgcttcattctgtccctgttgt

SEQ ID NO: 3505 - DNA, 40 bp, Artificial Sequence
  Description of Artificial Sequence: Synthetic primer
  Description of Combined DNA/RNA Molecule: Synthetic primer
acgacgacgacgaagctgaccaggctcacctgacaccccg

SEQ ID NO: 3506 - DNA, 39 bp, Artificial Sequence
  Description of Artificial Sequence: Synthetic primer
  Description of Combined DNA/RNA Molecule: Synthetic primer
acgacgacgacgaaaccaggctcacctgacaccccaggc

SEQ ID NO: 3507 - DNA, 50 bp, Artificial Sequence
  Description of Artificial Sequence: Synthetic primer
  Description of Combined DNA/RNA Molecule: Synthetic primer
acgacgacgacttgacgaacataatgtcctgaggcaggaggtgccccccg

SEQ ID NO: 3508 - DNA, 48 bp, Artificial Sequence
  Description of Artificial Sequence: Synthetic oligonucleotide
  Description of Combined DNA/RNA Molecule: Synthetic oligonucleotide
taagacgtatgctagcgccaaggtcaacagcaaaccccatacaccctg

SEQ ID NO: 3509 - DNA, 44 bp, Artificial Sequence
  Description of Artificial Sequence: Synthetic oligonucleotide
ccccattggcccagtcacacccacttggtcagcatcgactccta

SEQ ID NO: 3510 - DNA, 27 bp, Artificial Sequence
  Description of Artificial Sequence: Synthetic probe
ttccatacaccccattggcccagtcac

SEQ ID NO: 3511 - DNA, 21 bp, Artificial Sequence
  Description of Artificial Sequence: Synthetic primer
taagacgtatgctagcgccaa

SEQ ID NO: 3512 - DNA, 20 bp, Artificial Sequence
  Description of Artificial Sequence: Synthetic primer
taggagtcgatgctgaccaa

SEQ ID NO: 3513 - DNA, 45 bp, Artificial Sequence
  Description of Artificial Sequence: Synthetic primer
  Description of Combined DNA/RNA Molecule: Synthetic primer
taggagtcgatgctgaccaagaggtgcctgagcaggctatgggta

SEQ ID NO: 3514 - DNA, 58 bp, Artificial Sequence
  Description of Artificial Sequence: Synthetic primer
  Description of Combined DNA/RNA Molecule: Synthetic primer
acgacgacgacgaacattctttcctgttaaaaaaaaaaaattcacaaccttgaagaaa

SEQ ID NO: 3515 - DNA, 50 bp, Artificial Sequence
  Description of Artificial Sequence: Synthetic primer
  Description of Combined DNA/RNA Molecule: Synthetic primer
acgacgacgacttgacgaacataatcctggtggaggctgtgagcccccta

SEQ ID NO: 3516 - DNA, 51 bp, Artificial Sequence
  Description of Artificial Sequence: Synthetic oligonucleotide
  Description of Combined DNA/RNA Molecule: Synthetic oligonucleotide
tacatgccatcccacgacacaggctatgacttcactgttgtcatcaagcgt

SEQ ID NO: 3517 - DNA, 43 bp, Artificial Sequence
  Description of Artificial Sequence: Synthetic oligonucleotide
agcaccccacccaccacattctcctgtgtcggagcggttacta

SEQ ID NO: 3518 - DNA, 26 bp, Artificial Sequence
  Description of Artificial Sequence: Synthetic probe
aagtcatcaagcaccccacccaccac

SEQ ID NO: 3519 - DNA, 19 bp, Artificial Sequence
  Description of Artificial Sequence: Synthetic primer
tacatgccatcccacgaca

SEQ ID NO: 3520 - DNA, 19 bp, Artificial Sequence
  Description of Artificial Sequence: Synthetic primer
tagtaaccgctccgacaca

SEQ ID NO: 3521 - DNA, 42 bp, Artificial Sequence
  Description of Artificial Sequence: Synthetic primer
  Description of Combined DNA/RNA Molecule: Synthetic primer
tagtaaccgctccgacacaccctgctggctgtgggctggagg

SEQ ID NO: 3522 - DNA, 43 bp, Artificial Sequence
  Description of Artificial Sequence: Synthetic primer
  Description of Combined DNA/RNA Molecule: Synthetic primer
acgacgacgacgaacccaggcaaccatgtcaaaggacagttcg

SEQ ID NO: 3523 - DNA, 45 bp, Artificial Sequence
  Description of Artificial Sequence: Synthetic primer
  Description of Combined DNA/RNA Molecule: Synthetic primer
acgacgacgacgaacaggcaaccatgtcaaaggacagttcaggaa

SEQ ID NO: 3524 - DNA, 52 bp, Artificial Sequence
  Description of Artificial Sequence: Synthetic primer
  Description of Combined DNA/RNA Molecule: Synthetic primer
acgacgacgacttgacgaacataatgatgcaagagctgccagcactggggct

SEQ ID NO: 3525 - DNA, 49 bp, Artificial Sequence
  Description of Artificial Sequence: Synthetic oligonucleotide
  Description of Combined DNA/RNA Molecule: Synthetic oligonucleotide
tccaaacaagctgatccgtacatcatagaggtgcagcaccatcagtaag

SEQ ID NO: 3526 - DNA, 60 bp, Artificial Sequence
  Description of Artificial Sequence: Synthetic oligonucleotide
gtagaaaatccttgatgaaaacagaagtgtagtgagccaggtgtgtcggagcggttacta

SEQ ID NO: 3527 - DNA, 38 bp, Artificial Sequence
  Description of Artificial Sequence: Synthetic probe
ttaccatcagtagaaaatccttgatgaaaacagaagtg

SEQ ID NO: 3528 - DNA, 22 bp, Artificial Sequence
  Description of Artificial Sequence: Synthetic primer
tccaaacaagctgatccgtaca

SEQ ID NO: 3529 - DNA, 19 bp, Artificial Sequence
  Description of Artificial Sequence: Synthetic primer
tagtaaccgctccgacaca

SEQ ID NO: 3530 - DNA, 39 bp, Artificial Sequence
  Description of Artificial Sequence: Synthetic primer
  Description of Combined DNA/RNA Molecule: Synthetic primer
tagtaaccgctccgacacagggccccctgccccggctcg

SEQ ID NO: 3531 - DNA, 43 bp, Artificial Sequence
  Description of Artificial Sequence: Synthetic primer
  Description of Combined DNA/RNA Molecule: Synthetic primer
acgacgacgacgaacccagaggaccctaaagaccatcaggtga

SEQ ID NO: 3532 - DNA, 37 bp, Artificial Sequence
  Description of Artificial Sequence: Synthetic primer
  Description of Combined DNA/RNA Molecule: Synthetic primer
acgacgacgacgaatggcatgcccagaggaccctaag

SEQ ID NO: 3533 - DNA, 52 bp, Artificial Sequence
  Description of Artificial Sequence: Synthetic primer
  Description of Combined DNA/RNA Molecule: Synthetic primer
acgacgacgacttgacgaacataatgctgttgaggttctgggtgtgccctgt

SEQ ID NO: 3534 - DNA, 43 bp, Artificial Sequence
  Description of Artificial Sequence: Synthetic oligonucleotide
  Description of Combined DNA/RNA Molecule: Synthetic oligonucleotide
tagggcgacagttaccacaaggctgagggcaagggacaggatg

SEQ ID NO: 3535 - DNA, 41 bp, Artificial Sequence
  Description of Artificial Sequence: Synthetic oligonucleotide
ggacaccagggccacaggcagttgtgggtctcgctcgtata

SEQ ID NO: 3536 - DNA, 22 bp, Artificial Sequence
  Description of Artificial Sequence: Synthetic probe
ttagggacaggacaccagggcc

SEQ ID NO: 3537 - DNA, 20 bp, Artificial Sequence
  Description of Artificial Sequence: Synthetic primer
tagggcgacagttaccacaa

SEQ ID NO: 3538 - DNA, 20 bp, Artificial Sequence
  Description of Artificial Sequence: Synthetic primer
tatacgagcgagacccacaa

SEQ ID NO: 3539 - DNA, 43 bp, Artificial Sequence
  Description of Artificial Sequence: Synthetic primer
  Description of Combined DNA/RNA Molecule: Synthetic primer
tatacgagcgagacccacaatctgggtgtgccctgcttgtggt

SEQ ID NO: 3540 - DNA, 43 bp, Artificial Sequence
  Description of Artificial Sequence: Synthetic primer
  Description of Combined DNA/RNA Molecule: Synthetic primer
acgacgacgacgaatagcaggaaagcaaaacccacccagtccg

SEQ ID NO: 3541 - DNA, 42 bp, Artificial Sequence
  Description of Artificial Sequence: Synthetic primer
  Description of Combined DNA/RNA Molecule: Synthetic primer
acgacgacgacgaaggaaagcaaaacccacccagtccattcg

SEQ ID NO: 3542 - DNA, 57 bp, Artificial Sequence
  Description of Artificial Sequence: Synthetic primer
  Description of Combined DNA/RNA Molecule: Synthetic primer
acgacgacgacttgacgaacataatggatcttgcaggcaaagtgttgatgaaaggtt

SEQ ID NO: 3543 - DNA, 43 bp, Artificial Sequence
  Description of Artificial Sequence: Synthetic oligonucleotide
  Description of Combined DNA/RNA Molecule: Synthetic oligonucleotide
tccgactttagtgcgtcacaaagccccactgcctgacacccct

SEQ ID NO: 3544 - DNA, 50 bp, Artificial Sequence
  Description of Artificial Sequence: Synthetic oligonucleotide
ccctctagggtcattcttgggaacaggcagttgtgggtctcgctcgtata

SEQ ID NO: 3545 - DNA, 30 bp, Artificial Sequence
  Description of Artificial Sequence: Synthetic probe
aacctgacaccctctagggtcattcttggg

SEQ ID NO: 3546 - DNA, 21 bp, Artificial Sequence
  Description of Artificial Sequence: Synthetic primer
tccgactttagtgcgtcacaa

SEQ ID NO: 3547 - DNA, 20 bp, Artificial Sequence
  Description of Artificial Sequence: Synthetic primer
tatacgagcgagacccacaa

SEQ ID NO: 3548 - DNA, 51 bp, Artificial Sequence
  Description of Artificial Sequence: Synthetic primer
  Description of Combined DNA/RNA Molecule: Synthetic primer
tatacgagcgagacccacaagcaaagtgttgatgaaaggtctgcttgttct

SEQ ID NO: 3549 - DNA, 39 bp, Artificial Sequence; identical to SEQ ID NO: 2691
  Description of Artificial Sequence: Synthetic primer
  Description of Combined DNA/RNA Molecule: Synthetic primer

SEQ ID NO: 3550 - DNA, 39 bp, Artificial Sequence; identical to SEQ ID NO: 2692
  Description of Artificial Sequence: Synthetic primer
  Description of Combined DNA/RNA Molecule: Synthetic primer

SEQ ID NO: 3551 - DNA, 52 bp, Artificial Sequence; identical to SEQ ID NO: 2693
  Description of Artificial Sequence: Synthetic primer
  Description of Combined DNA/RNA Molecule: Synthetic primer

SEQ ID NO: 3552 - DNA, 46 bp, Artificial Sequence; identical to SEQ ID NO: 2694
  Description of Artificial Sequence: Synthetic oligonucleotide
  Description of Combined DNA/RNA Molecule: Synthetic oligonucleotide

SEQ ID NO: 3553 - DNA, 37 bp, Artificial Sequence; identical to SEQ ID NO: 2695
  Description of Artificial Sequence: Synthetic oligonucleotide

SEQ ID NO: 3554 - DNA, 18 bp, Artificial Sequence
  Description of Artificial Sequence: Synthetic probe
ttagccgcagccccaggg

SEQ ID NO: 3555 - DNA, 21 bp, Artificial Sequence
  Description of Artificial Sequence: Synthetic primer
tcgacgaatctgctcagacaa

SEQ ID NO: 3556 - DNA, 19 bp, Artificial Sequence
  Description of Artificial Sequence: Synthetic primer
tgctcagacgctgcttcaa

SEQ ID NO: 3557 - DNA, 43 bp, Artificial Sequence; identical to SEQ ID NO: 2699
  Description of Artificial Sequence: Synthetic primer
  Description of Combined DNA/RNA Molecule: Synthetic primer

SEQ ID NO: 3558 - DNA, 38 bp, Artificial Sequence; identical to SEQ ID NO: 839
  Description of Artificial Sequence: Synthetic primer
  Description of Combined DNA/RNA Molecule: Synthetic primer

SEQ ID NO: 3559 - DNA, 51 bp, Artificial Sequence; identical to SEQ ID NO: 840
  Description of Artificial Sequence: Synthetic primer
  Description of Combined DNA/RNA Molecule: Synthetic primer

SEQ ID NO: 3560 - DNA, 50 bp, Artificial Sequence; identical to SEQ ID NO: 841
  Description of Artificial Sequence: Synthetic oligonucleotide
  Description of Combined DNA/RNA Molecule: Synthetic oligonucleotide

SEQ ID NO: 3561 - DNA, 58 bp, Artificial Sequence; identical to SEQ ID NO: 842
  Description of Artificial Sequence: Synthetic oligonucleotide

SEQ ID NO: 3562 - DNA, 31 bp, Artificial Sequence; identical to SEQ ID NO: 843
  Description of Artificial Sequence: Synthetic probe

SEQ ID NO: 3563 - DNA, 19 bp, Artificial Sequence
  Description of Artificial Sequence: Synthetic primer
ttgcaaaccacccggacaa

SEQ ID NO: 3564 - DNA, 20 bp, Artificial Sequence
  Description of Artificial Sequence: Synthetic primer
taggagtcgatgctgaccaa

SEQ ID NO: 3565 - DNA, 50 bp, Artificial Sequence; identical to SEQ ID NO: 846
  Description of Artificial Sequence: Synthetic primer
  Description of Combined DNA/RNA Molecule: Synthetic primer

SEQ ID NO: 3566 - DNA, 25 bp, Artificial Sequence
  Description of Artificial Sequence: Synthetic primer
  Description of Combined DNA/RNA Molecule: Synthetic primer
acgacgacgacttgacgaacataac

SEQ ID NO: 3567 - DNA, 38 bp, Artificial Sequence; identical to SEQ ID NO: 847
  Description of Artificial Sequence: Synthetic primer
  Description of Combined DNA/RNA Molecule: Synthetic primer

SEQ ID NO: 3568 - DNA, 39 bp, Artificial Sequence; identical to SEQ ID NO: 848
  Description of Artificial Sequence: Synthetic primer
  Description of Combined DNA/RNA Molecule: Synthetic primer

SEQ ID NO: 3569 - DNA, 51 bp, Artificial Sequence; identical to SEQ ID NO: 849
  Description of Artificial Sequence: Synthetic primer
  Description of Combined DNA/RNA Molecule: Synthetic primer

SEQ ID NO: 3570 - DNA, 40 bp, Artificial Sequence; identical to SEQ ID NO: 850
  Description of Artificial Sequence: Synthetic oligonucleotide
  Description of Combined DNA/RNA Molecule: Synthetic oligonucleotide

SEQ ID NO: 3571 - DNA, 50 bp, Artificial Sequence; identical to SEQ ID NO: 851
  Description of Artificial Sequence: Synthetic oligonucleotide

SEQ ID NO: 3572 - DNA, 28 bp, Artificial Sequence
  Description of Artificial Sequence: Synthetic probe
aacccaacacatagcagccaacactcag

SEQ ID NO: 3573 - DNA, 19 bp, Artificial Sequence
  Description of Artificial Sequence: Synthetic primer
ttgcaaaccacccggacaa

SEQ ID NO: 3574 - DNA, 20 bp, Artificial Sequence
  Description of Artificial Sequence: Synthetic primer
taggagtcgatgctgaccaa

SEQ ID NO: 3575 - DNA, 45 bp, Artificial Sequence; identical to SEQ ID NO: 855
  Description of Artificial Sequence: Synthetic primer
  Description of Combined DNA/RNA Molecule: Synthetic primer

SEQ ID NO: 3576 - DNA, 41 bp, Artificial Sequence; identical to SEQ ID NO: 856
  Description of Artificial Sequence: Synthetic primer
  Description of Combined DNA/RNA Molecule: Synthetic primer

SEQ ID NO: 3577 - DNA, 41 bp, Artificial Sequence; identical to SEQ ID NO: 857
  Description of Artificial Sequence: Synthetic primer
  Description of Combined DNA/RNA Molecule: Synthetic primer

SEQ ID NO: 3578 - DNA, 48 bp, Artificial Sequence; identical to SEQ ID NO: 858
  Description of Artificial Sequence: Synthetic primer
  Description of Combined DNA/RNA Molecule: Synthetic primer

SEQ ID NO: 3579 - DNA, 48 bp, Artificial Sequence; identical to SEQ ID NO: 859
  Description of Artificial Sequence: Synthetic oligonucleotide
  Description of Combined DNA/RNA Molecule: Synthetic oligonucleotide

SEQ ID NO: 3580 - DNA, 49 bp, Artificial Sequence; identical to SEQ ID NO: 860
  Description of Artificial Sequence: Synthetic oligonucleotide

SEQ ID NO: 3581 - DNA, 25 bp, Artificial Sequence
  Description of Artificial Sequence: Synthetic probe
ttgggaacaggtgtgtgagtgcagc

SEQ ID NO: 3582 - DNA, 21 bp, Artificial Sequence
  Description of Artificial Sequence: Synthetic primer
taagacgtatgctagcgccaa

SEQ ID NO: 3583 - DNA, 20 bp, Artificial Sequence
  Description of Artificial Sequence: Synthetic primer
taggagtcgatgctgaccaa

SEQ ID NO: 3584 - DNA, 51 bp, Artificial Sequence; identical to SEQ ID NO: 864
  Description of Artificial Sequence: Synthetic primer
  Description of Combined DNA/RNA Molecule: Synthetic primer

SEQ ID NO: 3585 - DNA, 36 bp, Artificial Sequence; identical to SEQ ID NO: 865
  Description of Artificial Sequence: Synthetic primer
  Description of Combined DNA/RNA Molecule: Synthetic primer

SEQ ID NO: 3586 - DNA, 41 bp, Artificial Sequence; identical to SEQ ID NO: 866
  Description of Artificial Sequence: Synthetic primer
  Description of Combined DNA/RNA Molecule: Synthetic primer

SEQ ID NO: 3587 - DNA, 55 bp, Artificial Sequence; identical to SEQ ID NO: 867
  Description of Artificial Sequence: Synthetic primer
  Description of Combined DNA/RNA Molecule: Synthetic primer

SEQ ID NO: 3588 - DNA, 46 bp, Artificial Sequence; identical to SEQ ID NO: 868
  Description of Artificial Sequence: Synthetic oligonucleotide
  Description of Combined DNA/RNA Molecule: Synthetic oligonucleotide

SEQ ID NO: 3589 - DNA, 42 bp, Artificial Sequence; identical to SEQ ID NO: 869
  Description of Artificial Sequence: Synthetic oligonucleotide

SEQ ID NO: 3590 - DNA, 25 bp, Artificial Sequence
  Description of Artificial Sequence: Synthetic probe
ttggcatcagcagggagctgctcag

SEQ ID NO: 3591 - DNA, 19 bp, Artificial Sequence
  Description of Artificial Sequence: Synthetic primer
tacatgccatcccacgaca

SEQ ID NO: 3592 - DNA, 19 bp, Artificial Sequence
  Description of Artificial Sequence: Synthetic primer
tagtaaccgctccgacaca

SEQ ID NO: 3593 - DNA, 49 bp, Artificial Sequence; identical to SEQ ID NO: 873
  Description of Artificial Sequence: Synthetic primer
  Description of Combined DNA/RNA Molecule: Synthetic primer

SEQ ID NO: 3594 - DNA, 43 bp, Artificial Sequence; identical to SEQ ID NO: 881
  Description of Artificial Sequence: Synthetic primer
  Description of Combined DNA/RNA Molecule: Synthetic primer

SEQ ID NO: 3595 - DNA, 41 bp, Artificial Sequence; identical to SEQ ID NO: 882
  Description of Artificial Sequence: Synthetic primer
  Description of Combined DNA/RNA Molecule: Synthetic primer

SEQ ID NO: 3596 - DNA, 51 bp, Artificial Sequence; identical to SEQ ID NO: 883
  Description of Artificial Sequence: Synthetic primer
  Description of Combined DNA/RNA Molecule: Synthetic primer

SEQ ID NO: 3597 - DNA, 47 bp, Artificial Sequence; identical to SEQ ID NO: 884
  Description of Artificial Sequence: Synthetic oligonucleotide
  Description of Combined DNA/RNA Molecule: Synthetic oligonucleotide

SEQ ID NO: 3598 - DNA, 42 bp, Artificial Sequence; identical to SEQ ID NO: 885
  Description of Artificial Sequence: Synthetic oligonucleotide

SEQ ID NO: 3599 - DNA, 22 bp, Artificial Sequence
  Description of Artificial Sequence: Synthetic probe
tttccctcagcccccaacacag

SEQ ID NO: 3600 - DNA, 20 bp, Artificial Sequence
  Description of Artificial Sequence: Synthetic primer
tagggcgacagttaccacaa

SEQ ID NO: 3601 - DNA, 20 bp, Artificial Sequence
  Description of Artificial Sequence: Synthetic primer
tatacgagcgagacccacaa

SEQ ID NO: 3602 - DNA, 46 bp, Artificial Sequence; identical to SEQ ID NO: 889
  Description of Artificial Sequence: Synthetic primer
  Description of Combined DNA/RNA Molecule: Synthetic primer

SEQ ID NO: 3603 - DNA, 50 bp, Artificial Sequence; identical to SEQ ID NO: 890
  Description of Artificial Sequence: Synthetic primer
  Description of Combined DNA/RNA Molecule: Synthetic primer

SEQ ID NO: 3604 - DNA, 62 bp, Artificial Sequence; identical to SEQ ID NO: 891
  Description of Artificial Sequence: Synthetic primer
  Description of Combined DNA/RNA Molecule: Synthetic primer

SEQ ID NO: 3605 - DNA, 61 bp, Artificial Sequence; identical to SEQ ID NO: 892
  Description of Artificial Sequence: Synthetic oligonucleotide
  Description of Combined DNA/RNA Molecule: Synthetic oligonucleotide

SEQ ID NO: 3606 - DNA, 54 bp, Artificial Sequence; identical to SEQ ID NO: 893
  Description of Artificial Sequence: Synthetic oligonucleotide

SEQ ID NO: 3607 - DNA, 31 bp, Artificial Sequence; identical to SEQ ID NO: 894
  Description of Artificial Sequence: Synthetic probe

SEQ ID NO: 3608 - DNA, 21 bp, Artificial Sequence
  Description of Artificial Sequence: Synthetic primer
tccgactttagtgcgtcacaa

SEQ ID NO: 3609 - DNA, 20 bp, Artificial Sequence
  Description of Artificial Sequence: Synthetic primer
tatacgagcgagacccacaa

SEQ ID NO: 3610 - DNA, 61 bp, Artificial Sequence; identical to SEQ ID NO: 897
  Description of Artificial Sequence: Synthetic primer
  Description of Combined DNA/RNA Molecule: Synthetic primer

SEQ ID NO: 3611 - DNA, 47 bp, Artificial Sequence; identical to SEQ ID NO: 898
  Description of Artificial Sequence: Synthetic primer
  Description of Combined DNA/RNA Molecule: Synthetic primer

SEQ ID NO: 3612 - DNA, 45 bp, Artificial Sequence; identical to SEQ ID NO: 899
  Description of Artificial Sequence: Synthetic primer
  Description of Combined DNA/RNA Molecule: Synthetic primer

SEQ ID NO: 3613 - DNA, 50 bp, Artificial Sequence; identical to SEQ ID NO: 900
  Description of Artificial Sequence: Synthetic primer
  Description of Combined DNA/RNA Molecule: Synthetic primer

SEQ ID NO: 3614 - DNA, 56 bp, Artificial Sequence; identical to SEQ ID NO: 901
  Description of Artificial Sequence: Synthetic oligonucleotide
  Description of Combined DNA/RNA Molecule: Synthetic oligonucleotide

SEQ ID NO: 3615 - DNA, 55 bp, Artificial Sequence; identical to SEQ ID NO: 902
  Description of Artificial Sequence: Synthetic oligonucleotide

SEQ ID NO: 3616 - DNA, 31 bp, Artificial Sequence; identical to SEQ ID NO: 903
  Description of Artificial Sequence: Synthetic probe

SEQ ID NO: 3617 - DNA, 21 bp, Artificial Sequence
  Description of Artificial Sequence: Synthetic primer
tcaaacaaaggcgaccacaac

SEQ ID NO: 3618 - DNA, 22 bp, Artificial Sequence
  Description of Artificial Sequence: Synthetic primer
tatgaactgcctatgcgacaac

SEQ ID NO: 3619 - DNA, 44 bp, Artificial Sequence; identical to SEQ ID NO: 906
  Description of Artificial Sequence: Synthetic primer
  Description of Combined DNA/RNA Molecule: Synthetic primer

SEQ ID NO: 3620 - DNA, 44 bp, Artificial Sequence; identical to SEQ ID NO: 907
  Description of Artificial Sequence: Synthetic primer
  Description of Combined DNA/RNA Molecule: Synthetic primer

SEQ ID NO: 3621 - DNA, 49 bp, Artificial Sequence; identical to SEQ ID NO: 908
  Description of Artificial Sequence: Synthetic primer
  Description of Combined DNA/RNA Molecule: Synthetic primer

SEQ ID NO: 3622 - DNA, 49 bp, Artificial Sequence; identical to SEQ ID NO: 909
  Description of Artificial Sequence: Synthetic oligonucleotide
  Description of Combined DNA/RNA Molecule: Synthetic oligonucleotide

SEQ ID NO: 3623 - DNA, 47 bp, Artificial Sequence; identical to SEQ ID NO: 910
  Description of Artificial Sequence: Synthetic oligonucleotide

SEQ ID NO: 3624 - DNA, 29 bp, Artificial Sequence
  Description of Artificial Sequence: Synthetic probe
ttcagaacacacccaatctccagcaggag

SEQ ID NO: 3625 - DNA, 22 bp, Artificial Sequence
  Description of Artificial Sequence: Synthetic primer
taaacaatgagacccgctgaac

SEQ ID NO: 3626 - DNA, 22 bp, Artificial Sequence
  Description of Artificial Sequence: Synthetic primer
tatgaactgcctatgcgacaac

SEQ ID NO: 3627 - DNA, 44 bp, Artificial Sequence; identical to SEQ ID NO: 914
  Description of Artificial Sequence: Synthetic primer
  Description of Combined DNA/RNA Molecule: Synthetic primer

SEQ ID NO: 3628 - DNA, 37 bp, Artificial Sequence; identical to SEQ ID NO: 915
  Description of Artificial Sequence: Synthetic primer
  Description of Combined DNA/RNA Molecule: Synthetic primer

SEQ ID NO: 3629 - DNA, 41 bp, Artificial Sequence; identical to SEQ ID NO: 916
  Description of Artificial Sequence: Synthetic primer
  Description of Combined DNA/RNA Molecule: Synthetic primer

SEQ ID NO: 3630 - DNA, 50 bp, Artificial Sequence; identical to SEQ ID NO: 917
  Description of Artificial Sequence: Synthetic primer
  Description of Combined DNA/RNA Molecule: Synthetic primer

SEQ ID NO: 3631 - DNA, 42 bp, Artificial Sequence; identical to SEQ ID NO: 918
  Description of Artificial Sequence: Synthetic oligonucleotide
  Description of Combined DNA/RNA Molecule: Synthetic oligonucleotide

SEQ ID NO: 3632 - DNA, 44 bp, Artificial Sequence; identical to SEQ ID NO: 919
  Description of Artificial Sequence: Synthetic oligonucleotide

SEQ ID NO: 3633 - DNA, 28 bp, Artificial Sequence
  Description of Artificial Sequence: Synthetic probe
ttgcatacagcacatcagccaccagcac

SEQ ID NO: 3634 - DNA, 19 bp, Artificial Sequence
  Description of Artificial Sequence: Synthetic primer
tctgccagaacaccgacac

SEQ ID NO: 3635 - DNA, 19 bp, Artificial Sequence
  Description of Artificial Sequence: Synthetic primer
tcaccgtacgccaacacac

SEQ ID NO: 3636 - DNA, 44 bp, Artificial Sequence; identical to SEQ ID NO: 923
  Description of Artificial Sequence: Synthetic primer
  Description of Combined DNA/RNA Molecule: Synthetic primer

SEQ ID NO: 3637 - DNA, 43 bp, Artificial Sequence; identical to SEQ ID NO: 933
  Description of Artificial Sequence: Synthetic primer
  Description of Combined DNA/RNA Molecule: Synthetic primer

SEQ ID NO: 3638 - DNA, 46 bp, Artificial Sequence; identical to SEQ ID NO: 934
  Description of Artificial Sequence: Synthetic primer
  Description of Combined DNA/RNA Molecule: Synthetic primer

SEQ ID NO: 3639 - DNA, 56 bp, Artificial Sequence; identical to SEQ ID NO: 935
  Description of Artificial Sequence: Synthetic primer
  Description of Combined DNA/RNA Molecule: Synthetic primer

SEQ ID NO: 3640 - DNA, 45 bp, Artificial Sequence; identical to SEQ ID NO: 936
  Description of Artificial Sequence: Synthetic oligonucleotide
  Description of Combined DNA/RNA Molecule: Synthetic oligonucleotide

SEQ ID NO: 3641 - DNA, 47 bp, Artificial Sequence; identical to SEQ ID NO: 937
  Description of Artificial Sequence: Synthetic oligonucleotide

SEQ ID NO: 3642 - DNA, 24 bp, Artificial Sequence
  Description of Artificial Sequence: Synthetic probe
ttgccaacaggcctgtgatcccag

SEQ ID NO: 3643 - DNA, 21 bp, Artificial Sequence
  Description of Artificial Sequence: Synthetic primer
ttctagataccacggacgcac

SEQ ID NO: 3644 - DNA, 20 bp, Artificial Sequence
  Description of Artificial Sequence: Synthetic primer
tcagctttgcacaccaacac

SEQ ID NO: 3645 - DNA, 46 bp, Artificial Sequence; identical to SEQ ID NO: 941
  Description of Artificial Sequence: Synthetic primer
  Description of Combined DNA/RNA Molecule: Synthetic primer

SEQ ID NO: 3646 - DNA, 39 bp, Artificial Sequence; identical to SEQ ID NO: 1013
  Description of Artificial Sequence: Synthetic primer
  Description of Combined DNA/RNA Molecule: Synthetic primer

SEQ ID NO: 3647 - DNA, 41 bp, Artificial Sequence; identical to SEQ ID NO: 1014
  Description of Artificial Sequence: Synthetic primer
  Description of Combined DNA/RNA Molecule: Synthetic primer

SEQ ID NO: 3648 - DNA, 52 bp, Artificial Sequence; identical to SEQ ID NO: 1015
  Description of Artificial Sequence: Synthetic primer
  Description of Combined DNA/RNA Molecule: Synthetic primer

SEQ ID NO: 3649 - DNA, 45 bp, Artificial Sequence; identical to SEQ ID NO: 1016
  Description of Artificial Sequence: Synthetic oligonucleotide
  Description of Combined DNA/RNA Molecule: Synthetic oligonucleotide

SEQ ID NO: 3650 - DNA, 47 bp, Artificial Sequence; identical to SEQ ID NO: 1017
  Description of Artificial Sequence: Synthetic oligonucleotide

SEQ ID NO: 3651 - DNA, 26 bp, Artificial Sequence
  Description of Artificial Sequence: Synthetic probe
aacacctcaggacctagacccccacc

SEQ ID NO: 3652 - DNA, 20 bp, Artificial Sequence
  Description of Artificial Sequence: Synthetic primer
tcgctcttcagcctcctaca

SEQ ID NO: 3653 - DNA, 22 bp, Artificial Sequence
  Description of Artificial Sequence: Synthetic primer
tccggcaataattcccagaaca

SEQ ID NO: 3654 - DNA, 46 bp, Artificial Sequence; identical to SEQ ID NO: 1021
  Description of Artificial Sequence: Synthetic primer
  Description of Combined DNA/RNA Molecule: Synthetic primer

SEQ ID NO: 3655 - DNA, 42 bp, Artificial Sequence; identical to SEQ ID NO: 1039
  Description of Artificial Sequence: Synthetic primer
  Description of Combined DNA/RNA Molecule: Synthetic primer

SEQ ID NO: 3656 - DNA, 42 bp, Artificial Sequence; identical to SEQ ID NO: 1040
  Description of Artificial Sequence: Synthetic primer
  Description of Combined DNA/RNA Molecule: Synthetic primer

SEQ ID NO: 3657 - DNA, 51 bp, Artificial Sequence; identical to SEQ ID NO: 1041
  Description of Artificial Sequence: Synthetic primer
  Description of Combined DNA/RNA Molecule: Synthetic primer

SEQ ID NO: 3658 - DNA, 58 bp, Artificial Sequence; identical to SEQ ID NO: 1042
  Description of Artificial Sequence: Synthetic oligonucleotide
  Description of Combined DNA/RNA Molecule: Synthetic oligonucleotide

SEQ ID NO: 3659 - DNA, 48 bp, Artificial Sequence; identical to SEQ ID NO: 1043
  Description of Artificial Sequence: Synthetic oligonucleotide

SEQ ID NO: 3660 - DNA, 26 bp, Artificial Sequence
  Description of Artificial Sequence: Synthetic probe
ttcaccgcaataagggccagcctgta

SEQ ID NO: 3661 - DNA, 21 bp, Artificial Sequence
  Description of Artificial Sequence: Synthetic primer
tcatctgttcgtcagggtcca

SEQ ID NO: 3662 - DNA, 20 bp, Artificial Sequence
  Description of Artificial Sequence: Synthetic primer
tcctccgggtaaagtcacca

SEQ ID NO: 3663 - DNA, 46 bp, Artificial Sequence; identical to SEQ ID NO: 1047
  Description of Artificial Sequence: Synthetic primer
  Description of Combined DNA/RNA Molecule: Synthetic primer

SEQ ID NO: 3664 - DNA, 39 bp, Artificial Sequence; identical to SEQ ID NO: 1507
  Description of Artificial Sequence: Synthetic primer
  Description of Combined DNA/RNA Molecule: Synthetic primer

SEQ ID NO: 3665 - DNA, 37 bp, Artificial Sequence; identical to SEQ ID NO: 1508
  Description of Artificial Sequence: Synthetic primer
  Description of Combined DNA/RNA Molecule: Synthetic primer

SEQ ID NO: 3666 - DNA, 51 bp, Artificial Sequence; identical to SEQ ID NO: 1509
  Description of Artificial Sequence: Synthetic primer
  Description of Combined DNA/RNA Molecule: Synthetic primer

SEQ ID NO: 3667 - DNA, 46 bp, Artificial Sequence; identical to SEQ ID NO: 1510
  Description of Artificial Sequence: Synthetic oligonucleotide
  Description of Combined DNA/RNA Molecule: Synthetic oligonucleotide

SEQ ID NO: 3668 - DNA, 42 bp, Artificial Sequence; identical to SEQ ID NO: 1511
  Description of Artificial Sequence: Synthetic oligonucleotide

SEQ ID NO: 3669 - DNA, 19 bp, Artificial Sequence
  Description of Artificial Sequence: Synthetic probe
ttccccgcacctcccaccc

SEQ ID NO: 3670 - DNA, 20 bp, Artificial Sequence
  Description of Artificial Sequence: Synthetic primer
tcgcggaaagtcccagtaac

SEQ ID NO: 3671 - DNA, 20 bp, Artificial Sequence
  Description of Artificial Sequence: Synthetic primer
tggaacgcttacaggccaac

SEQ ID NO: 3672 - DNA, 44 bp, Artificial Sequence; identical to SEQ ID NO: 1515
  Description of Artificial Sequence: Synthetic primer
  Description of Combined DNA/RNA Molecule: Synthetic primer

SEQ ID NO: 3673 - DNA, 53 bp, Artificial Sequence; identical to SEQ ID NO: 1525
  Description of Artificial Sequence: Synthetic primer
  Description of Combined DNA/RNA Molecule: Synthetic primer

SEQ ID NO: 3674 - DNA, 51 bp, Artificial Sequence; identical to SEQ ID NO: 1526
  Description of Artificial Sequence: Synthetic primer
  Description of Combined DNA/RNA Molecule: Synthetic primer

SEQ ID NO: 3675 - DNA, 47 bp, Artificial Sequence; identical to SEQ ID NO: 1527
  Description of Artificial Sequence: Synthetic oligonucleotide
  Description of Combined DNA/RNA Molecule: Synthetic oligonucleotide

SEQ ID NO: 3676 - DNA, 46 bp, Artificial Sequence; identical to SEQ ID NO: 1528
  Description of Artificial Sequence: Synthetic oligonucleotide

SEQ ID NO: 3677 - DNA, 29 bp, Artificial Sequence
  Description of Artificial Sequence: Synthetic probe
ttatcatcacctctacagggagggagcca

SEQ ID NO: 3678 - DNA, 21 bp, Artificial Sequence
  Description of Artificial Sequence: Synthetic primer
tacacgtggatatctccgacc

SEQ ID NO: 3679 - DNA, 21 bp, Artificial Sequence
  Description of Artificial Sequence: Synthetic primer
tggaactgtgtgactagcacc

SEQ ID NO: 3680 - DNA, 44 bp, Artificial Sequence; identical to SEQ ID NO: 1532
  Description of Artificial Sequence: Synthetic primer
  Description of Combined DNA/RNA Molecule: Synthetic primer

SEQ ID NO: 3681 - DNA, 43 bp, Artificial Sequence; identical to SEQ ID NO: 1533
  Description of Artificial Sequence: Synthetic primer
  Description of Combined DNA/RNA Molecule: Synthetic primer

SEQ ID NO: 3682 - DNA, 44 bp, Artificial Sequence; identical to SEQ ID NO: 1534
  Description of Artificial Sequence: Synthetic primer
  Description of Combined DNA/RNA Molecule: Synthetic primer

SEQ ID NO: 3683 - DNA, 57 bp, Artificial Sequence; identical to SEQ ID NO: 1535
  Description of Artificial Sequence: Synthetic primer
  Description of Combined DNA/RNA Molecule: Synthetic primer

SEQ ID NO: 3684 - DNA, 45 bp, Artificial Sequence; identical to SEQ ID NO: 1536
  Description of Artificial Sequence: Synthetic oligonucleotide
  Description of Combined DNA/RNA Molecule: Synthetic oligonucleotide

SEQ ID NO: 3685 - DNA, 47 bp, Artificial Sequence; identical to SEQ ID NO: 1537
  Description of Artificial Sequence: Synthetic oligonucleotide

SEQ ID NO: 3686 - DNA, 25 bp, Artificial Sequence
  Description of Artificial Sequence: Synthetic probe
aaagcctcaaccagctgaacagccc

SEQ ID NO: 3687 - DNA, 19 bp, Artificial Sequence
  Description of Artificial Sequence: Synthetic primer
tagcattcgagaacgcacc

SEQ ID NO: 3688 - DNA, 21 bp, Artificial Sequence
  Description of Artificial Sequence: Synthetic primer
tggaactgtgtgactagcacc

SEQ ID NO: 3689 - DNA, 52 bp, Artificial Sequence; identical to SEQ ID NO: 1541
  Description of Artificial Sequence: Synthetic primer
  Description of Combined DNA/RNA Molecule: Synthetic primer

SEQ ID NO: 3690 - DNA, 43 bp, Artificial Sequence; identical to SEQ ID NO: 1542
  Description of Artificial Sequence: Synthetic primer
  Description of Combined DNA/RNA Molecule: Synthetic primer

SEQ ID NO: 3691 - DNA, 63 bp, Artificial Sequence; identical to SEQ ID NO: 1543
  Description of Artificial Sequence: Synthetic primer
  Description of Combined DNA/RNA Molecule: Synthetic primer

SEQ ID NO: 3692 - DNA, 47 bp, Artificial Sequence; identical to SEQ ID NO: 1544
  Description of Artificial Sequence: Synthetic oligonucleotide
  Description of Combined DNA/RNA Molecule: Synthetic oligonucleotide

SEQ ID NO: 3693 - DNA, 45 bp, Artificial Sequence; identical to SEQ ID NO: 1545
  Description of Artificial Sequence: Synthetic oligonucleotide

SEQ ID NO: 3694 - DNA, 25 bp, Artificial Sequence
  Description of Artificial Sequence: Synthetic probe
aagcattcagccaggttggccctca

SEQ ID NO: 3695 - DNA, 20 bp, Artificial Sequence
  Description of Artificial Sequence: Synthetic primer
taaccgggcctaaagtgaca

SEQ ID NO: 3696 - DNA, 22 bp, Artificial Sequence
  Description of Artificial Sequence: Synthetic primer
tggagagggagatcacgtaaca

SEQ ID NO: 3697 - DNA, 53 bp, Artificial Sequence; identical to SEQ ID NO: 1549
  Description of Artificial Sequence: Synthetic primer
  Description of Combined DNA/RNA Molecule: Synthetic primer

SEQ ID NO: 3698 - DNA, 44 bp, Artificial Sequence; identical to SEQ ID NO: 1550
  Description of Artificial Sequence: Synthetic primer
  Description of Combined DNA/RNA Molecule: Synthetic primer

SEQ ID NO: 3699 - DNA, 40 bp, Artificial Sequence; identical to SEQ ID NO: 1551
  Description of Artificial Sequence: Synthetic primer
  Description of Combined DNA/RNA Molecule: Synthetic primer

SEQ ID NO: 3700 - DNA, 48 bp, Artificial Sequence; identical to SEQ ID NO: 1552
  Description of Artificial Sequence: Synthetic primer
  Description of Combined DNA/RNA Molecule: Synthetic primer

SEQ ID NO: 3701 - DNA, 46 bp, Artificial Sequence; identical to SEQ ID NO: 1553
  Description of Artificial Sequence: Synthetic oligonucleotide
  Description of Combined DNA/RNA Molecule: Synthetic oligonucleotide

SEQ ID NO: 3702 - DNA, 44 bp, Artificial Sequence; identical to SEQ ID NO: 1554
  Description of Artificial Sequence: Synthetic oligonucleotide

SEQ ID NO: 3703 - DNA, 26 bp, Artificial Sequence
  Description of Artificial Sequence: Synthetic probe
ttcatgacacaggagcagcatgggtc

SEQ ID NO: 3704 - DNA, 22 bp, Artificial Sequence
  Description of Artificial Sequence: Synthetic primer
tcgatggtcaatgagcttcaca

SEQ ID NO: 3705 - DNA, 22 bp, Artificial Sequence
  Description of Artificial Sequence: Synthetic primer
tggagagggagatcacgtaaca

SEQ ID NO: 3706 - DNA, 45 bp, Artificial Sequence; identical to SEQ ID NO: 1558
  Description of Artificial Sequence: Synthetic primer
  Description of Combined DNA/RNA Molecule: Synthetic primer

SEQ ID NO: 3707 - DNA, 46 bp, Artificial Sequence; identical to SEQ ID NO: 1613
  Description of Artificial Sequence: Synthetic primer
  Description of Combined DNA/RNA Molecule: Synthetic primer

SEQ ID NO: 3708 - DNA, 47 bp, Artificial Sequence; identical to SEQ ID NO: 1614
  Description of Artificial Sequence: Synthetic primer
  Description of Combined DNA/RNA Molecule: Synthetic primer

SEQ ID NO: 3709 - DNA, 54 bp, Artificial Sequence; identical to SEQ ID NO: 1615
  Description of Artificial Sequence: Synthetic primer
  Description of Combined DNA/RNA Molecule: Synthetic primer

SEQ ID NO: 3710 - DNA, 44 bp, Artificial Sequence; identical to SEQ ID NO: 1616
  Description of Artificial Sequence: Synthetic oligonucleotide
  Description of Combined DNA/RNA Molecule: Synthetic oligonucleotide

SEQ ID NO: 3711 - DNA, 40 bp, Artificial Sequence; identical to SEQ ID NO: 1617
  Description of Artificial Sequence: Synthetic oligonucleotide

SEQ ID NO: 3712 - DNA, 19 bp, Artificial Sequence
  Description of Artificial Sequence: Synthetic probe
ttacccccagcagccaccc

SEQ ID NO: 3713 - DNA, 19 bp, Artificial Sequence
  Description of Artificial Sequence: Synthetic primer
ttcgtccctgcacgctaac

SEQ ID NO: 3714 - DNA, 20 bp, Artificial Sequence
  Description of Artificial Sequence: Synthetic primer
tggcctaacggtgatggaac

SEQ ID NO: 3715 - DNA, 46 bp, Artificial Sequence; identical to SEQ ID NO: 1621
  Description of Artificial Sequence: Synthetic primer
  Description of Combined DNA/RNA Molecule: Synthetic primer

SEQ ID NO: 3716 - DNA, 40 bp, Artificial Sequence; identical to SEQ ID NO: 1622
  Description of Artificial Sequence: Synthetic primer
  Description of Combined DNA/RNA Molecule: Synthetic primer

SEQ ID NO: 3717 - DNA, 62 bp, Artificial Sequence; identical to SEQ ID NO: 1623
  Description of Artificial Sequence: Synthetic primer
  Description of Combined DNA/RNA Molecule: Synthetic primer

SEQ ID NO: 3718 - DNA, 56 bp, Artificial Sequence; identical to SEQ ID NO: 1624
  Description of Artificial Sequence: Synthetic oligonucleotide
  Description of Combined DNA/RNA Molecule: Synthetic oligonucleotide

SEQ ID NO: 3719 - DNA, 57 bp, Artificial Sequence; identical to SEQ ID NO: 1625
  Description of Artificial Sequence: Synthetic oligonucleotide

SEQ ID NO: 3720 - DNA, 39 bp, Artificial Sequence; identical to SEQ ID NO: 1626
  Description of Artificial Sequence: Synthetic probe

SEQ ID NO: 3721 - DNA, 22 bp, Artificial Sequence
  Description of Artificial Sequence: Synthetic primer
tgatgctggcaaaccctagaac

SEQ ID NO: 3722 - DNA, 20 bp, Artificial Sequence
  Description of Artificial Sequence: Synthetic primer
tggcctaacggtgatggaac

SEQ ID NO: 3723 - DNA, 37 bp, Artificial Sequence; identical to SEQ ID NO: 1647
  Description of Artificial Sequence: Synthetic primer
  Description of Combined DNA/RNA Molecule: Synthetic primer

SEQ ID NO: 3724 - DNA, 42 bp, Artificial Sequence; identical to SEQ ID NO: 1648
  Description of Artificial Sequence: Synthetic primer
  Description of Combined DNA/RNA Molecule: Synthetic primer

SEQ ID NO: 3725 - DNA, 48 bp, Artificial Sequence; identical to SEQ ID NO: 1649
  Description of Artificial Sequence: Synthetic primer
  Description of Combined DNA/RNA Molecule: Synthetic primer

SEQ ID NO: 3726 - DNA, 48 bp, Artificial Sequence; identical to SEQ ID NO: 1650
  Description of Artificial Sequence: Synthetic oligonucleotide
  Description of Combined DNA/RNA Molecule: Synthetic oligonucleotide

SEQ ID NO: 3727 - DNA, 57 bp, Artificial Sequence; identical to SEQ ID NO: 1651
  Description of Artificial Sequence: Synthetic oligonucleotide

SEQ ID NO: 3728 - DNA, 36 bp, Artificial Sequence; identical to SEQ ID NO: 1652
  Description of Artificial Sequence: Synthetic probe

SEQ ID NO: 3729 - DNA, 20 bp, Artificial Sequence
  Description of Artificial Sequence: Synthetic primer
tccgggtatacactgtccca

SEQ ID NO: 3730 - DNA, 21 bp, Artificial Sequence
  Description of Artificial Sequence: Synthetic primer
tggcctgtcctctgttaacca

SEQ ID NO: 3731 - DNA, 46 bp, Artificial Sequence; identical to SEQ ID NO: 1655
  Description of Artificial Sequence: Synthetic primer
  Description of Combined DNA/RNA Molecule: Synthetic primer

SEQ ID NO: 3732 - DNA, 38 bp, Artificial Sequence; identical to SEQ ID NO: 1781
  Description of Artificial Sequence: Synthetic primer
  Description of Combined DNA/RNA Molecule: Synthetic primer

SEQ ID NO: 3733 - DNA, 38 bp, Artificial Sequence; identical to SEQ ID NO: 1782
  Description of Artificial Sequence: Synthetic primer
  Description of Combined DNA/RNA Molecule: Synthetic primer

SEQ ID NO: 3734 - DNA, 48 bp, Artificial Sequence; identical to SEQ ID NO: 1783
  Description of Artificial Sequence: Synthetic primer
  Description of Combined DNA/RNA Molecule: Synthetic primer

SEQ ID NO: 3735 - DNA, 43 bp, Artificial Sequence; identical to SEQ ID NO: 1784
  Description of Artificial Sequence: Synthetic oligonucleotide
  Description of Combined DNA/RNA Molecule: Synthetic oligonucleotide

SEQ ID NO: 3736 - DNA, 45 bp, Artificial Sequence; identical to SEQ ID NO: 1785
  Description of Artificial Sequence: Synthetic oligonucleotide

SEQ ID NO: 3737 - DNA, 24 bp, Artificial Sequence
  Description of Artificial Sequence: Synthetic probe
ttggcctcaacccttccccaccac

SEQ ID NO: 3738 - DNA, 20 bp, Artificial Sequence
  Description of Artificial Sequence: Synthetic primer
tatagtcacgcaggaccaca

SEQ ID NO: 3739 - DNA, 21 bp, Artificial Sequence
  Description of Artificial Sequence: Synthetic primer
tgtcatagacagccgcaaaca

SEQ ID NO: 3740 - DNA, 46 bp, Artificial Sequence; identical to SEQ ID NO: 1789
  Description of Artificial Sequence: Synthetic primer
  Description of Combined DNA/RNA Molecule: Synthetic primer

SEQ ID NO: 3741 - DNA, 42 bp, Artificial Sequence; identical to SEQ ID NO: 1790
  Description of Artificial Sequence: Synthetic primer
  Description of Combined DNA/RNA Molecule: Synthetic primer

SEQ ID NO: 3742 - DNA, 43 bp, Artificial Sequence; identical to SEQ ID NO: 1791
  Description of Artificial Sequence: Synthetic primer
  Description of Combined DNA/RNA Molecule: Synthetic primer

SEQ ID NO: 3743 - DNA, 53 bp, Artificial Sequence; identical to SEQ ID NO: 1792
  Description of Artificial Sequence: Synthetic primer
  Description of Combined DNA/RNA Molecule: Synthetic primer

SEQ ID NO: 3744 - DNA, 48 bp, Artificial Sequence; identical to SEQ ID NO: 1793
  Description of Artificial Sequence: Synthetic oligonucleotide
  Description of Combined DNA/RNA Molecule: Synthetic oligonucleotide

SEQ ID NO: 3745 - DNA, 47 bp, Artificial Sequence; identical to SEQ ID NO: 1794
  Description of Artificial Sequence: Synthetic oligonucleotide

SEQ ID NO: 3746 - DNA, 24 bp, Artificial Sequence
  Description of Artificial Sequence: Synthetic probe
aaaggctcacaaggagggctctgc

SEQ ID NO: 3747 - DNA, 22 bp, Artificial Sequence
  Description of Artificial Sequence: Synthetic primer
tgccctatcgaaaaggacaaca

SEQ ID NO: 3748 - DNA, 21 bp, Artificial Sequence
  Description of Artificial Sequence: Synthetic primer
tgtcatagacagccgcaaaca

SEQ ID NO: 3749 - DNA, 47 bp, Artificial Sequence; identical to SEQ ID NO: 1798
  Description of Artificial Sequence: Synthetic primer
  Description of Combined DNA/RNA Molecule: Synthetic primer

SEQ ID NO: 3750 - DNA, 45 bp, Artificial Sequence; identical to SEQ ID NO: 1799
  Description of Artificial Sequence: Synthetic primer
  Description of Combined DNA/RNA Molecule: Synthetic primer

SEQ ID NO: 3751 - DNA, 48 bp, Artificial Sequence; identical to SEQ ID NO: 1800
  Description of Artificial Sequence: Synthetic primer
  Description of Combined DNA/RNA Molecule: Synthetic primer

SEQ ID NO: 3752 - DNA, 55 bp, Artificial Sequence; identical to SEQ ID NO: 1801
  Description of Artificial Sequence: Synthetic primer
  Description of Combined DNA/RNA Molecule: Synthetic primer

SEQ ID NO: 3753 - DNA, 47 bp, Artificial Sequence; identical to SEQ ID NO: 1802
  Description of Artificial Sequence: Synthetic oligonucleotide
  Description of Combined DNA/RNA Molecule: Synthetic oligonucleotide

SEQ ID NO: 3754 - DNA, 49 bp, Artificial Sequence; identical to SEQ ID NO: 1803
  Description of Artificial Sequence: Synthetic oligonucleotide

SEQ ID NO: 3755 - DNA, 24 bp, Artificial Sequence
  Description of Artificial Sequence: Synthetic probe
ttggagacagccaggagaggcagc

SEQ ID NO: 3756 - DNA, 21 bp, Artificial Sequence
  Description of Artificial Sequence: Synthetic primer
taatctccagacctccgaacc

SEQ ID NO: 3757 - DNA, 22 bp, Artificial Sequence
  Description of Artificial Sequence: Synthetic primer
tgtcccgttcaatccttacacc

SEQ ID NO: 3758 - DNA, 48 bp, Artificial Sequence; identical to SEQ ID NO: 1807
  Description of Artificial Sequence: Synthetic primer
  Description of Combined DNA/RNA Molecule: Synthetic primer

SEQ ID NO: 3759 - DNA, 40 bp, Artificial Sequence; identical to SEQ ID NO: 1808
  Description of Artificial Sequence: Synthetic primer
  Description of Combined DNA/RNA Molecule: Synthetic primer

SEQ ID NO: 3760 - DNA, 38 bp, Artificial Sequence; identical to SEQ ID NO: 1809
  Description of Artificial Sequence: Synthetic primer
  Description of Combined DNA/RNA Molecule: Synthetic primer

SEQ ID NO: 3761 - DNA, 52 bp, Artificial Sequence; identical to SEQ ID NO: 1810
  Description of Artificial Sequence: Synthetic primer
  Description of Combined DNA/RNA Molecule: Synthetic primer

SEQ ID NO: 3762 - DNA, 47 bp, Artificial Sequence; identical to SEQ ID NO: 1811
  Description of Artificial Sequence: Synthetic oligonucleotide
  Description of Combined DNA/RNA Molecule: Synthetic oligonucleotide

SEQ ID NO: 3763 - DNA, 55 bp, Artificial Sequence; identical to SEQ ID NO: 1812
  Description of Artificial Sequence: Synthetic oligonucleotide

SEQ ID NO: 3764 - DNA, 35 bp, Artificial Sequence; identical to SEQ ID NO: 1813
  Description of Artificial Sequence: Synthetic probe

SEQ ID NO: 3765 - DNA, 19 bp, Artificial Sequence
  Description of Artificial Sequence: Synthetic primer
ttttccgcgtcagagcaca

SEQ ID NO: 3766 - DNA, 22 bp, Artificial Sequence
  Description of Artificial Sequence: Synthetic primer
tgtcgagctaggtccgataaca

SEQ ID NO: 3767 - DNA, 48 bp, Artificial Sequence; identical to SEQ ID NO: 1816
  Description of Artificial Sequence: Synthetic primer
  Description of Combined DNA/RNA Molecule: Synthetic primer

SEQ ID NO: 3768 - DNA, 43 bp, Artificial Sequence; identical to SEQ ID NO: 1817
  Description of Artificial Sequence: Synthetic primer
  Description of Combined DNA/RNA Molecule: Synthetic primer

SEQ ID NO: 3769 - DNA, 44 bp, Artificial Sequence; identical to SEQ ID NO: 1818
  Description of Artificial Sequence: Synthetic primer
  Description of Combined DNA/RNA Molecule: Synthetic primer

SEQ ID NO: 3770 - DNA, 48 bp, Artificial Sequence; identical to SEQ ID NO: 1819
  Description of Artificial Sequence: Synthetic primer
  Description of Combined DNA/RNA Molecule: Synthetic primer

SEQ ID NO: 3771 - DNA, 45 bp, Artificial Sequence; identical to SEQ ID NO: 1820
  Description of Artificial Sequence: Synthetic oligonucleotide
  Description of Combined DNA/RNA Molecule: Synthetic oligonucleotide

SEQ ID NO: 3772 - DNA, 46 bp, Artificial Sequence; identical to SEQ ID NO: 1821
  Description of Artificial Sequence: Synthetic oligonucleotide

SEQ ID NO: 3773 - DNA, 26 bp, Artificial Sequence
  Description of Artificial Sequence: Synthetic probe
ttgacaacacttcccacccacctgcc

SEQ ID NO: 3774 - DNA, 19 bp, Artificial Sequence
  Description of Artificial Sequence: Synthetic primer
ttcgctgcccggttaaaca

SEQ ID NO: 3775 - DNA, 22 bp, Artificial Sequence
  Description of Artificial Sequence: Synthetic primer
tgtcgagctaggtccgataaca

SEQ ID NO: 3776 - DNA, 47 bp, Artificial Sequence; identical to SEQ ID NO: 1825
  Description of Artificial Sequence: Synthetic primer
  Description of Combined DNA/RNA Molecule: Synthetic primer

SEQ ID NO: 3777 - DNA, 40 bp, Artificial Sequence; identical to SEQ ID NO: 1826
  Description of Artificial Sequence: Synthetic primer
  Description of Combined DNA/RNA Molecule: Synthetic primer

SEQ ID NO: 3778 - DNA, 39 bp, Artificial Sequence; identical to SEQ ID NO: 1827
  Description of Artificial Sequence: Synthetic primer
  Description of Combined DNA/RNA Molecule: Synthetic primer

SEQ ID NO: 3779 - DNA, 52 bp, Artificial Sequence; identical to SEQ ID NO: 1828
  Description of Artificial Sequence: Synthetic primer
  Description of Combined DNA/RNA Molecule: Synthetic primer

SEQ ID NO: 3780 - DNA, 42 bp, Artificial Sequence; identical to SEQ ID NO: 1829
  Description of Artificial Sequence: Synthetic oligonucleotide
  Description of Combined DNA/RNA Molecule: Synthetic oligonucleotide

SEQ ID NO: 3781 - DNA, 43 bp, Artificial Sequence; identical to SEQ ID NO: 1830
  Description of Artificial Sequence: Synthetic oligonucleotide

SEQ ID NO: 3782 - DNA, 23 bp, Artificial Sequence
  Description of Artificial Sequence: Synthetic probe
aaggtgtcaggcagggctgcact

SEQ ID NO: 3783 - DNA, 19 bp, Artificial Sequence
  Description of Artificial Sequence: Synthetic primer
ttcgctgcccggttaaaca

SEQ ID NO: 3784 - DNA, 22 bp, Artificial Sequence
  Description of Artificial Sequence: Synthetic primer
tgtcgagctaggtccgataaca

SEQ ID NO: 3785 - DNA, 45 bp, Artificial Sequence; identical to SEQ ID NO: 1834
  Description of Artificial Sequence: Synthetic primer
  Description of Combined DNA/RNA Molecule: Synthetic primer

SEQ ID NO: 3786 - DNA, 40 bp, Artificial Sequence; identical to SEQ ID NO: 1853
  Description of Artificial Sequence: Synthetic primer
  Description of Combined DNA/RNA Molecule: Synthetic primer

SEQ ID NO: 3787 - DNA, 38 bp, Artificial Sequence; identical to SEQ ID NO: 1854
  Description of Artificial Sequence: Synthetic primer
  Description of Combined DNA/RNA Molecule: Synthetic primer

SEQ ID NO: 3788 - DNA, 51 bp, Artificial Sequence; identical to SEQ ID NO: 1855
  Description of Artificial Sequence: Synthetic primer
  Description of Combined DNA/RNA Molecule: Synthetic primer

SEQ ID NO: 3789 - DNA, 49 bp, Artificial Sequence; identical to SEQ ID NO: 1856
  Description of Artificial Sequence: Synthetic oligonucleotide
  Description of Combined DNA/RNA Molecule: Synthetic oligonucleotide

SEQ ID NO: 3790 - DNA, 47 bp, Artificial Sequence; identical to SEQ ID NO: 1857
  Description of Artificial Sequence: Synthetic oligonucleotide

SEQ ID NO: 3791 - DNA, 29 bp, Artificial Sequence
  Description of Artificial Sequence: Synthetic probe
ttgctgtcattttctcacagccacccacc

SEQ ID NO: 3792 - DNA, 22 bp, Artificial Sequence
  Description of Artificial Sequence: Synthetic primer
tcctgctctgaaaacctacacc

SEQ ID NO: 3793 - DNA, 22 bp, Artificial Sequence
  Description of Artificial Sequence: Synthetic primer
tgtctaagccgcctatgtaacc

SEQ ID NO: 3794 - DNA, 47 bp, Artificial Sequence; identical to SEQ ID NO: 1861
  Description of Artificial Sequence: Synthetic primer
  Description of Combined DNA/RNA Molecule: Synthetic primer

SEQ ID NO: 3795 - DNA, 40 bp, Artificial Sequence; identical to SEQ ID NO: 1898
  Description of Artificial Sequence: Synthetic primer
  Description of Combined DNA/RNA Molecule: Synthetic primer

SEQ ID NO: 3796 - DNA, 39 bp, Artificial Sequence; identical to SEQ ID NO: 1899
  Description of Artificial Sequence: Synthetic primer
  Description of Combined DNA/RNA Molecule: Synthetic primer

SEQ ID NO: 3797 - DNA, 49 bp, Artificial Sequence; identical to SEQ ID NO: 1900
  Description of Artificial Sequence: Synthetic primer
  Description of Combined DNA/RNA Molecule: Synthetic primer

SEQ ID NO: 3798 - DNA, 44 bp, Artificial Sequence; identical to SEQ ID NO: 1901
  Description of Artificial Sequence: Synthetic oligonucleotide
  Description of Combined DNA/RNA Molecule: Synthetic oligonucleotide

SEQ ID NO: 3799 - DNA, 45 bp, Artificial Sequence; identical to SEQ ID NO: 1902
  Description of Artificial Sequence: Synthetic oligonucleotide

SEQ ID NO: 3800 - DNA, 26 bp, Artificial Sequence
  Description of Artificial Sequence: Synthetic probe
ttctggacaagtgacagccccagctc

SEQ ID NO: 3801 - DNA, 22 bp, Artificial Sequence
  Description of Artificial Sequence: Synthetic primer
tggataaactaagtccgcccac

SEQ ID NO: 3802 - DNA, 21 bp, Artificial Sequence
  Description of Artificial Sequence: Synthetic primer
tgttagacgtcgctcagtcac

SEQ ID NO: 3803 - DNA, 46 bp, Artificial Sequence; identical to SEQ ID NO: 1906
  Description of Artificial Sequence: Synthetic primer
  Description of Combined DNA/RNA Molecule: Synthetic primer

SEQ ID NO: 3804 - DNA, 38 bp, Artificial Sequence; identical to SEQ ID NO: 1934
  Description of Artificial Sequence: Synthetic primer
  Description of Combined DNA/RNA Molecule: Synthetic primer

SEQ ID NO: 3805 - DNA, 40 bp, Artificial Sequence; identical to SEQ ID NO: 1935
  Description of Artificial Sequence: Synthetic primer
  Description of Combined DNA/RNA Molecule: Synthetic primer

SEQ ID NO: 3806 - DNA, 52 bp, Artificial Sequence; identical to SEQ ID NO: 1936
  Description of Artificial Sequence: Synthetic primer
  Description of Combined DNA/RNA Molecule: Synthetic primer

SEQ ID NO: 3807 - DNA, 53 bp, Artificial Sequence; identical to SEQ ID NO: 1937
  Description of Artificial Sequence: Synthetic oligonucleotide
  Description of Combined DNA/RNA Molecule: Synthetic oligonucleotide

SEQ ID NO: 3808 - DNA, 49 bp, Artificial Sequence; identical to SEQ ID NO: 1938
  Description of Artificial Sequence: Synthetic oligonucleotide

SEQ ID NO: 3809 - DNA, 29 bp, Artificial Sequence
  Description of Artificial Sequence: Synthetic probe
cctttcgcatggtggaatcctccacatct

SEQ ID NO: 3810 - DNA, 19 bp, Artificial Sequence
  Description of Artificial Sequence: Synthetic primer
tcctcgagccgatgacaca

SEQ ID NO: 3811 - DNA, 19 bp, Artificial Sequence
  Description of Artificial Sequence: Synthetic primer
ttagcccacggacgttaca

SEQ ID NO: 3812 - DNA, 46 bp, Artificial Sequence; identical to SEQ ID NO: 1942
  Description of Artificial Sequence: Synthetic primer
  Description of Combined DNA/RNA Molecule: Synthetic primer

SEQ ID NO: 3813 - DNA, 48 bp, Artificial Sequence; identical to SEQ ID NO: 1943
  Description of Artificial Sequence: Synthetic primer
  Description of Combined DNA/RNA Molecule: Synthetic primer

SEQ ID NO: 3814 - DNA, 49 bp, Artificial Sequence; identical to SEQ ID NO: 1944
  Description of Artificial Sequence: Synthetic primer
  Description of Combined DNA/RNA Molecule: Synthetic primer

SEQ ID NO: 3815 - DNA, 53 bp, Artificial Sequence; identical to SEQ ID NO: 1945
  Description of Artificial Sequence: Synthetic primer
  Description of Combined DNA/RNA Molecule: Synthetic primer

SEQ ID NO: 3816 - DNA, 48 bp, Artificial Sequence; identical to SEQ ID NO: 1946
  Description of Artificial Sequence: Synthetic oligonucleotide
  Description of Combined DNA/RNA Molecule: Synthetic oligonucleotide

SEQ ID NO: 3817 - DNA, 47 bp, Artificial Sequence; identical to SEQ ID NO: 1947
  Description of Artificial Sequence: Synthetic oligonucleotide

SEQ ID NO: 3818 - DNA, 31 bp, Artificial Sequence; identical to SEQ ID NO: 1948
  Description of Artificial Sequence: Synthetic probe

SEQ ID NO: 3819 - DNA, 21 bp, Artificial Sequence
  Description of Artificial Sequence: Synthetic primer
tactatcgtatcacgccgaca

SEQ ID NO: 3820 - DNA, 19 bp, Artificial Sequence
  Description of Artificial Sequence: Synthetic primer
ttagcccacggacgttaca

SEQ ID NO: 3821 - DNA, 47 bp, Artificial Sequence; identical to SEQ ID NO: 1951
  Description of Artificial Sequence: Synthetic primer
  Description of Combined DNA/RNA Molecule: Synthetic primer

SEQ ID NO: 3822 - DNA, 38 bp, Artificial Sequence; identical to SEQ ID NO: 2781
  Description of Artificial Sequence: Synthetic primer
  Description of Combined DNA/RNA Molecule: Synthetic primer

SEQ ID NO: 3823 - DNA, 39 bp, Artificial Sequence; identical to SEQ ID NO: 2782
  Description of Artificial Sequence: Synthetic primer
  Description of Combined DNA/RNA Molecule: Synthetic primer

SEQ ID NO: 3824 - DNA, 53 bp, Artificial Sequence; identical to SEQ ID NO: 2783
  Description of Artificial Sequence: Synthetic primer
  Description of Combined DNA/RNA Molecule: Synthetic primer

SEQ ID NO: 3825 - DNA, 47 bp, Artificial Sequence; identical to SEQ ID NO: 2784
  Description of Artificial Sequence: Synthetic oligonucleotide
  Description of Combined DNA/RNA Molecule: Synthetic oligonucleotide

SEQ ID NO: 3826 - DNA, 47 bp, Artificial Sequence; identical to SEQ ID NO: 2785
  Description of Artificial Sequence: Synthetic oligonucleotide

SEQ ID NO: 3827 - DNA, 30 bp, Artificial Sequence; identical to SEQ ID NO: 2786
  Description of Artificial Sequence: Synthetic probe

SEQ ID NO: 3828 - DNA, 19 bp, Artificial Sequence
  Description of Artificial Sequence: Synthetic primer
tagcattcgagaacgcacc

SEQ ID NO: 3829 - DNA, 21 bp, Artificial Sequence
  Description of Artificial Sequence: Synthetic primer
tggaactgtgtgactagcacc

SEQ ID NO: 3830 - DNA, 48 bp, Artificial Sequence; identical to SEQ ID NO: 2789
  Description of Artificial Sequence: Synthetic primer
  Description of Combined DNA/RNA Molecule: Synthetic primer

SEQ ID NO: 3831 - DNA, 44 bp, Artificial Sequence; identical to SEQ ID NO: 2844
  Description of Artificial Sequence: Synthetic primer
  Description of Combined DNA/RNA Molecule: Synthetic primer

SEQ ID NO: 3832 - DNA, 48 bp, Artificial Sequence; identical to SEQ ID NO: 2845
  Description of Artificial Sequence: Synthetic primer
  Description of Combined DNA/RNA Molecule: Synthetic primer

SEQ ID NO: 3833 - DNA, 55 bp, Artificial Sequence; identical to SEQ ID NO: 2846
  Description of Artificial Sequence: Synthetic primer
  Description of Combined DNA/RNA Molecule: Synthetic primer

SEQ ID NO: 3834 - DNA, 51 bp, Artificial Sequence; identical to SEQ ID NO: 2847
  Description of Artificial Sequence: Synthetic oligonucleotide
  Description of Combined DNA/RNA Molecule: Synthetic oligonucleotide

SEQ ID NO: 3835 - DNA, 47 bp, Artificial Sequence; identical to SEQ ID NO: 2848
  Description of Artificial Sequence: Synthetic oligonucleotide

SEQ ID NO: 3836 - DNA, 26 bp, Artificial Sequence
  Description of Artificial Sequence: Synthetic probe
aagacaccagcaccagcagcaatgag

SEQ ID NO: 3837 - DNA, 21 bp, Artificial Sequence
  Description of Artificial Sequence: Synthetic primer
tcacagagacttgccgatcac

SEQ ID NO: 3838 - DNA, 22 bp, Artificial Sequence
  Description of Artificial Sequence: Synthetic primer
tggccatgtctaagctacacac

SEQ ID NO: 3839 - DNA, 49 bp, Artificial Sequence; identical to SEQ ID NO: 2852
  Description of Artificial Sequence: Synthetic primer
  Description of Combined DNA/RNA Molecule: Synthetic primer

SEQ ID NO: 3840 - DNA, 41 bp, Artificial Sequence
  Description of Artificial Sequence: Synthetic primer
  Description of Combined DNA/RNA Molecule: Synthetic primer
acgacgacgacgaaccatccatcaaggcagcacacaccaag

SEQ ID NO: 3841 - DNA, 41 bp, Artificial Sequence
  Description of Artificial Sequence: Synthetic primer
  Description of Combined DNA/RNA Molecule: Synthetic primer
acgacgacgacgaatccatcaaggcagcacacaccaaaaaa

SEQ ID NO: 3842 - DNA, 60 bp, Artificial Sequence
  Description of Artificial Sequence: Synthetic primer
  Description of Combined DNA/RNA Molecule: Synthetic primer
acgacgacgacttgacgaacataatctgaaggtactgttcacatggtccatgatcutgcc

SEQ ID NO: 3843 - DNA, 50 bp, Artificial Sequence
  Description of Artificial Sequence: Synthetic oligonucleotide
  Description of Combined DNA/RNA Molecule: Synthetic oligonucleotide
tcaaacaaaggcgaccacaaccagctggagggacttctacttccaggtat

SEQ ID NO: 3844 - DNA, 53 bp, Artificial Sequence
  Description of Artificial Sequence: Synthetic oligonucleotide
ggtgcataccctcaagttttcactgctggtggttgtcgcataggcagttcata

SEQ ID NO: 3845 - DNA, 33 bp, Artificial Sequence
  Description of Artificial Sequence: Synthetic probe
aaacttccaggtgcataccctcaagttttcact

SEQ ID NO: 3846 - DNA, 21 bp, Artificial Sequence
  Description of Artificial Sequence: Synthetic primer
tcaaacaaaggcgaccacaac

SEQ ID NO: 3847 - DNA, 22 bp, Artificial Sequence
  Description of Artificial Sequence: Synthetic primer
tatgaactgcctatgcgacaac

SEQ ID NO: 3848 - DNA, 54 bp, Artificial Sequence
  Description of Artificial Sequence: Synthetic primer
  Description of Combined DNA/RNA Molecule: Synthetic primer
tatgaactgcctatgcgacaacactgttcacatggtccatgatcttgttggtcg

SEQ ID NO: 3849 - DNA, 43 bp, Artificial Sequence
  Description of Artificial Sequence: Synthetic primer
  Description of Combined DNA/RNA Molecule: Synthetic primer
acgacgacgacgaacaactgaggtttgcacacacagtccctct

SEQ ID NO: 3850 - DNA, 40 bp, Artificial Sequence
  Description of Artificial Sequence: Synthetic primer
  Description of Combined DNA/RNA Molecule: Synthetic primer
acgacgacgacgaacaccaccccctctccaactgaggtcc

SEQ ID NO: 3851 - DNA, 53 bp, Artificial Sequence
  Description of Artificial Sequence: Synthetic primer
  Description of Combined DNA/RNA Molecule: Synthetic primer
acgacgacgacttgacgaacataatggtgcctctgcagctgatagagcagctg

SEQ ID NO: 3852 - DNA, 45 bp, Artificial Sequence
  Description of Artificial Sequence: Synthetic oligonucleotide
  Description of Combined DNA/RNA Molecule: Synthetic oligonucleotide
taaacaatgagacccgctgaaccccccaccaccaccaacagtatg

SEQ ID NO: 3853 - DNA, 51 bp, Artificial Sequence
  Description of Artificial Sequence: Synthetic oligonucleotide
gtacacactcagctgggttcccactctgcgttgtcgcataggcagttcata

SEQ ID NO: 3854 - DNA, 29 bp, Artificial Sequence
  Description of Artificial Sequence: Synthetic probe
ttaccaacagtacacactcagctgggttc

SEQ ID NO: 3855 - DNA, 22 bp, Artificial Sequence
  Description of Artificial Sequence: Synthetic primer
taaacaatgagacccgctgaac

SEQ ID NO: 3856 - DNA, 22 bp, Artificial Sequence
  Description of Artificial Sequence: Synthetic primer
tatgaactgcctatgcgacaac

SEQ ID NO: 3857 - DNA, 54 bp, Artificial Sequence
  Description of Artificial Sequence: Synthetic primer
  Description of Combined DNA/RNA Molecule: Synthetic primer
tatgaactgcctatgcgacaacagctattgtgaccttcccttgcagaatgggag

SEQ ID NO: 3858 - DNA, 37 bp, Artificial Sequence
  Description of Artificial Sequence: Synthetic primer
  Description of Combined DNA/RNA Molecule: Synthetic primer
acgacgacgacgaagggccacccctactgccaccaga

SEQ ID NO: 3859 - DNA, 39 bp, Artificial Sequence
  Description of Artificial Sequence: Synthetic primer
  Description of Combined DNA/RNA Molecule: Synthetic primer
acgacgacgacgaaccacaagcacaagggccacccctat

SEQ ID NO: 3860 - DNA, 52 bp, Artificial Sequence
  Description of Artificial Sequence: Synthetic primer
  Description of Combined DNA/RNA Molecule: Synthetic primer
acgacgacgacttgacgaacataatggtgccagagtgtgctgagtgcugagg

SEQ ID NO: 3861 - DNA, 47 bp, Artificial Sequence
  Description of Artificial Sequence: Synthetic oligonucleotide
  Description of Combined DNA/RNA Molecule: Synthetic oligonucleotide
tctgccagaacaccgacacccaggacttcctgcagctgtccaccctg

SEQ ID NO: 3862 - DNA, 39 bp, Artificial Sequence
  Description of Artificial Sequence: Synthetic oligonucleotide
ccccacactgccagggctgcgtgtgttggcgtacggtga

SEQ ID NO: 3863 - DNA, 23 bp, Artificial Sequence
  Description of Artificial Sequence: Synthetic probe
ttctgtccaccccacactgccag

SEQ ID NO: 3864 - DNA, 19 bp, Artificial Sequence
  Description of Artificial Sequence: Synthetic primer
tctgccagaacaccgacac

SEQ ID NO: 3865 - DNA, 19 bp, Artificial Sequence
  Description of Artificial Sequence: Synthetic primer
tcaccgtacgccaacacac

SEQ ID NO: 3866 - DNA, 45 bp, Artificial Sequence
  Description of Artificial Sequence: Synthetic primer
  Description of Combined DNA/RNA Molecule: Synthetic primer
tcaccgtacgccaacacactgccagagtgtgctgagtgttgagac

SEQ ID NO: 3867 - DNA, 36 bp, Artificial Sequence
  Description of Artificial Sequence: Synthetic primer
  Description of Combined DNA/RNA Molecule: Synthetic primer
acgacgacgacgaaccactgcccagcctgcauggct

SEQ ID NO: 3868 - DNA, 38 bp, Artificial Sequence
  Description of Artificial Sequence: Synthetic primer
  Description of Combined DNA/RNA Molecule: Synthetic primer
acgacgacgacgaaccctacccactgcccagccugcaa

SEQ ID NO: 3869 - DNA, 48 bp, Artificial Sequence
  Description of Artificial Sequence: Synthetic primer
  Description of Combined DNA/RNA Molecule: Synthetic primer
acgacgacgacttgacgaacataatggtggtggctgtggtggcuggat

SEQ ID NO: 3870 - DNA, 46 bp, Artificial Sequence
  Description of Artificial Sequence: Synthetic oligonucleotide
  Description of Combined DNA/RNA Molecule: Synthetic oligonucleotide
tccggatcaaagcagccacccacagctaccacccacacgcacattt

SEQ ID NO: 3871 - DNA, 43 bp, Artificial Sequence
  Description of Artificial Sequence: Synthetic oligonucleotide
catccacaccaccaccaccaccccgtgtgttggcgtacggtga

SEQ ID NO: 3872 - DNA, 24 bp, Artificial Sequence
  Description of Artificial Sequence: Synthetic probe
ttacacgcacatccacaccaccac

SEQ ID NO: 3873 - DNA, 19 bp, Artificial Sequence
  Description of Artificial Sequence: Synthetic primer
tccggatcaaagcagccac

SEQ ID NO: 3874 - DNA, 19 bp, Artificial Sequence
  Description of Artificial Sequence: Synthetic primer
tcaccgtacgccaacacac

SEQ ID NO: 3875 - DNA, 45 bp, Artificial Sequence
  Description of Artificial Sequence: Synthetic primer
  Description of Combined DNA/RNA Molecule: Synthetic primer
tcaccgtacgccaacacacggctgtggtggctggactcgtgggac

SEQ ID NO: 3876 - DNA, 42 bp, Artificial Sequence
  Description of Artificial Sequence: Synthetic primer
  Description of Combined DNA/RNA Molecule: Synthetic primer
acgacgacgacgaagacagcaggatgggagagtcccautcat

SEQ ID NO: 3877 - DNA, 41 bp, Artificial Sequence
  Description of Artificial Sequence: Synthetic primer
  Description of Combined DNA/RNA Molecule: Synthetic primer
acgacgacgacgaacagctcctggaggacagcaggaugggc

SEQ ID NO: 3878 - DNA, 52 bp, Artificial Sequence
  Description of Artificial Sequence: Synthetic primer
  Description of Combined DNA/RNA Molecule: Synthetic primer
acgacgacgacttgacgaacataatcctccacagtgcacttcctggcagcac

SEQ ID NO: 3879 - DNA, 44 bp, Artificial Sequence
  Description of Artificial Sequence: Synthetic oligonucleotide
  Description of Combined DNA/RNA Molecule: Synthetic oligonucleotide
ttctagataccacggacgcaccccagccccacagagtcagatga

SEQ ID NO: 3880 - DNA, 52 bp, Artificial Sequence
  Description of Artificial Sequence: Synthetic oligonucleotide
gatagaaacactgccactgccaactccatgctgtgttggtgtgcaaagctga

SEQ ID NO: 3881 - DNA, 32 bp, Artificial Sequence
  Description of Artificial Sequence: Synthetic probe
ttagagtcagatagaaacactgccactgccaa

SEQ ID NO: 3882 - DNA, 21 bp, Artificial Sequence
  Description of Artificial Sequence: Synthetic primer
ttctagataccacggacgcac

SEQ ID NO: 3883 - DNA, 20 bp, Artificial Sequence
  Description of Artificial Sequence: Synthetic primer
tcagctttgcacaccaacac

SEQ ID NO: 3884 - DNA, 47 bp, Artificial Sequence
  Description of Artificial Sequence: Synthetic primer
  Description of Combined DNA/RNA Molecule: Synthetic primer
acgacgacgacgaacaggaatccaacagaggaacaaaacacactggc

SEQ ID NO: 3885 - DNA, 41 bp, Artificial Sequence
  Description of Artificial Sequence: Synthetic primer
  Description of Combined DNA/RNA Molecule: Synthetic primer
acgacgacgacgaacccctcagccaggaatccaacagggaa

SEQ ID NO: 3886 - DNA, 54 bp, Artificial Sequence
  Description of Artificial Sequence: Synthetic primer
  Description of Combined DNA/RNA Molecule: Synthetic primer
acgacgacgacttgacgaacataatctcttgatgttggcccctgtgctcaatag

SEQ ID NO: 3887 - DNA, 52 bp, Artificial Sequence
  Description of Artificial Sequence: Synthetic oligonucleotide
  Description of Combined DNA/RNA Molecule: Synthetic oligonucleotide
tatgcggaccgatgactcaaggtaaacacagcaacatacagggaacacaaat

SEQ ID NO: 3888 - DNA, 47 bp, Artificial Sequence
  Description of Artificial Sequence: Synthetic oligonucleotide
caagcaagggagggagcaccagcaattgcttggcttgatctacctga

SEQ ID NO: 3889 - DNA, 26 bp, Artificial Sequence
  Description of Artificial Sequence: Synthetic probe
ttgggaacacaagcaagggagggagc

SEQ ID NO: 3890 - DNA, 20 bp, Artificial Sequence
  Description of Artificial Sequence: Synthetic primer
tatgcggaccgatgactcaa

SEQ ID NO: 3891 - DNA, 22 bp, Artificial Sequence
  Description of Artificial Sequence: Synthetic primer
tcaggtagatcaagccaagcaa

SEQ ID NO: 3892 - DNA, 46 bp, Artificial Sequence
  Description of Artificial Sequence: Synthetic primer
  Description of Combined DNA/RNA Molecule: Synthetic primer
tcaggtagatcaagccaagcaacctgtgctccctcccttgtggtgt

SEQ ID NO: 3893 - DNA, 48 bp, Artificial Sequence
  Description of Artificial Sequence: Synthetic primer
  Description of Combined DNA/RNA Molecule: Synthetic primer
acgacgacgacgaatatttgtttggcaataccagcactatccactaga

SEQ ID NO: 3894 - DNA, 49 bp, Artificial Sequence
  Description of Artificial Sequence: Synthetic primer
  Description of Combined DNA/RNA Molecule: Synthetic primer
acgacgacgacgaatttgtttggcaataccagcactatccactaggtgt

SEQ ID NO: 3895 - DNA, 54 bp, Artificial Sequence
  Description of Artificial Sequence: Synthetic primer
  Description of Combined DNA/RNA Molecule: Synthetic primer
acgacgacgacttgacgaacataattgagcattgctgccactggaaaacugtcc

SEQ ID NO: 3896 - DNA, 47 bp, Artificial Sequence
  Description of Artificial Sequence: Synthetic oligonucleotide
  Description of Combined DNA/RNA Molecule: Synthetic oligonucleotide
ttcgtgggcacacaagcaaccagcacttgctgagtctcaacaccatt

SEQ ID NO: 3897 - DNA, 55 bp, Artificial Sequence
  Description of Artificial Sequence: Synthetic oligonucleotide
ccaccagattcttgctagcaaggtccagagcagttgcttggcttgatctacctga

SEQ ID NO: 3898 - DNA, 33 bp, Artificial Sequence
  Description of Artificial Sequence: Synthetic probe
aactcaacaccaccagattcttgctagcaaggt

SEQ ID NO: 3899 - DNA, 19 bp, Artificial Sequence
  Description of Artificial Sequence: Synthetic primer
ttcgtgggcacacaagcaa

SEQ ID NO: 3900 - DNA, 22 bp, Artificial Sequence
  Description of Artificial Sequence: Synthetic primer
tcaggtagatcaagccaagcaa

SEQ ID NO: 3901 - DNA, 52 bp, Artificial Sequence
  Description of Artificial Sequence: Synthetic primer
  Description of Combined DNA/RNA Molecule: Synthetic primer
tcaggtagatcaagccaagcaacattgctgccactggaaaactgtttgctaa

SEQ ID NO: 3902 - DNA, 44 bp, Artificial Sequence
  Description of Artificial Sequence: Synthetic primer
  Description of Combined DNA/RNA Molecule: Synthetic primer
acgacgacgacgaaccagaggcaggaaagtgatttctcagaaaa

SEQ ID NO: 3903 - DNA, 44 bp, Artificial Sequence
  Description of Artificial Sequence: Synthetic primer
  Description of Combined DNA/RNA Molecule: Synthetic primer
acgacgacgacgaactgccagaggcaggaaagtgatttcucagg

SEQ ID NO: 3904 - DNA, 52 bp, Artificial Sequence
  Description of Artificial Sequence: Synthetic primer
  Description of Combined DNA/RNA Molecule: Synthetic primer
acgacgacgacttgacgaacataatggatgggtggtgtgcagagtgauggct

SEQ ID NO: 3905 - DNA, 50 bp, Artificial Sequence
  Description of Artificial Sequence: Synthetic oligonucleotide
  Description of Combined DNA/RNA Molecule: Synthetic oligonucleotide
ttgaaggaggaaatcggcacagagcacttcaaagaaggcaggtcacacgg

SEQ ID NO: 3906 - DNA, 55 bp, Artificial Sequence
  Description of Artificial Sequence: Synthetic oligonucleotide
cacaagccaagctgacactattggtcagtgtggtgtcgaaccgttttaggactga

SEQ ID NO: 3907 - DNA, 32 bp, Artificial Sequence
  Description of Artificial Sequence: Synthetic probe
ttcaggtcacacaagccaagctgacactattg

SEQ ID NO: 3908 - DNA, 21 bp, Artificial Sequence
  Description of Artificial Sequence: Synthetic primer
ttgaaggaggaaatcggcaca

SEQ ID NO: 3909 - DNA, 22 bp, Artificial Sequence
  Description of Artificial Sequence: Synthetic primer
tcagtcctaaaacggttcgaca

SEQ ID NO: 3910 - DNA, 50 bp, Artificial Sequence
  Description of Artificial Sequence: Synthetic primer
  Description of Combined DNA/RNA Molecule: Synthetic primer
tcagtcctaaaacggttcgacagtgtgcagagtgatggccacattgaccg

SEQ ID NO: 3911 - DNA, 47 bp, Artificial Sequence
  Description of Artificial Sequence: Synthetic primer
  Description of Combined DNA/RNA Molecule: Synthetic primer
acgacgacgacgaaaatgcctaattcccacagttaaggctcagtgga

SEQ ID NO: 3912 - DNA, 47 bp, Artificial Sequence
  Description of Artificial Sequence: Synthetic primer
  Description of Combined DNA/RNA Molecule: Synthetic primer
acgacgacgacgaacctaattcccacagttaaggctcagtgggtgga

SEQ ID NO: 3913 - DNA, 63 bp, Artificial Sequence
  Description of Artificial Sequence: Synthetic primer
  Description of Combined DNA/RNA Molecule: Synthetic primer
acgacgacgacttgacgaacataatggtgtataatgaaatgaaattgggcctctggaaaaagc

SEQ ID NO: 3914 - DNA, 47 bp, Artificial Sequence
  Description of Artificial Sequence: Synthetic oligonucleotide
  Description of Combined DNA/RNA Molecule: Synthetic oligonucleotide
ttcggcaggctacggtacaggcacatgcacacaggatccccaccact

SEQ ID NO: 3915 - DNA, 55 bp, Artificial Sequence
  Description of Artificial Sequence: Synthetic oligonucleotide
ccatcaggcacctgcagaacacacttggaaatctgtcgaaccgttttaggactga

SEQ ID NO: 3916 - DNA, 24 bp, Artificial Sequence
  Description of Artificial Sequence: Synthetic probe
ttatccccaccatcaggcacctgc

SEQ ID NO: 3917 - DNA, 19 bp, Artificial Sequence
  Description of Artificial Sequence: Synthetic primer
ttcggcaggctacggtaca

SEQ ID NO: 3918 - DNA, 22 bp, Artificial Sequence
  Description of Artificial Sequence: Synthetic primer
tcagtcctaaaacggttcgaca

SEQ ID NO: 3919 - DNA, 56 bp, Artificial Sequence
  Description of Artificial Sequence: Synthetic primer
  Description of Combined DNA/RNA Molecule: Synthetic primer
tcagtcctaaaacggttcgacatgaaatgaaattgggcctctggaaaaaatgattc

SEQ ID NO: 3920 - DNA, 43 bp, Artificial Sequence
  Description of Artificial Sequence: Synthetic primer
  Description of Combined DNA/RNA Molecule: Synthetic primer
acgacgacgacgaacttcccaaagtgctgggatcctcagctct

SEQ ID NO: 3921 - DNA, 41 bp, Artificial Sequence
  Description of Artificial Sequence: Synthetic primer
  Description of Combined DNA/RNA Molecule: Synthetic primer
acgacgacgacgaaccacccacctcagcttcccaaagtgcc

SEQ ID NO: 3922 - DNA, 49 bp, Artificial Sequence
  Description of Artificial Sequence: Synthetic primer
  Description of Combined DNA/RNA Molecule: Synthetic primer
acgacgacgacttgacgaacataatctgccagctgctgctgacccagcc

SEQ ID NO: 3923 - DNA, 46 bp, Artificial Sequence
  Description of Artificial Sequence: Synthetic oligonucleotide
  Description of Combined DNA/RNA Molecule: Synthetic oligonucleotide
tctcgacgatgaaaagcaacagacaaggaggcacagggacaagtaa

SEQ ID NO: 3924 - DNA, 44 bp, Artificial Sequence
  Description of Artificial Sequence: Synthetic oligonucleotide
agtgaggagggcatcctcagtgagctgtgggtactgtccgtgga

SEQ ID NO: 3925 - DNA, 24 bp, Artificial Sequence
  Description of Artificial Sequence: Synthetic probe
ttagggacaagtgaggagggcatc

SEQ ID NO: 3926 - DNA, 21 bp, Artificial Sequence
  Description of Artificial Sequence: Synthetic primer
tctcgacgatgaaaagcaaca

SEQ ID NO: 3927 - DNA, 19 bp, Artificial Sequence
  Description of Artificial Sequence: Synthetic primer
tccacggacagtacccaca

SEQ ID NO: 3928 - DNA, 50 bp, Artificial Sequence
  Description of Artificial Sequence: Synthetic primer
  Description of Combined DNA/RNA Molecule: Synthetic primer
tccacggacagtacccacactcaggagggtatttgtgtgctcactgaggg

SEQ ID NO: 3929 - DNA, 38 bp, Artificial Sequence
  Description of Artificial Sequence: Synthetic primer
  Description of Combined DNA/RNA Molecule: Synthetic primer
acgacgacgacgaactggaggcagcagagagcaccaaa

SEQ ID NO: 3930 - DNA, 39 bp, Artificial Sequence
  Description of Artificial Sequence: Synthetic primer
  Description of Combined DNA/RNA Molecule: Synthetic primer
acgacgacgacgaagcagcagagagcaccaaggcagccg

SEQ ID NO: 3931 - DNA, 52 bp, Artificial Sequence
  Description of Artificial Sequence: Synthetic primer
  Description of Combined DNA/RNA Molecule: Synthetic primer
acgacgacgacttgacgaacataatcctgatgcctccagatgcctgcugcta

SEQ ID NO: 3932 - DNA, 48 bp, Artificial Sequence
  Description of Artificial Sequence: Synthetic oligonucleotide
  Description of Combined DNA/RNA Molecule: Synthetic oligonucleotide
ttctaggcgacacgacaacagcttgtgtcatggagcagcaacaggcgt

SEQ ID NO: 3933 - DNA, 41 bp, Artificial Sequence
  Description of Artificial Sequence: Synthetic oligonucleotide
ggcacagaggacactggagggatgtgggtactgtccgtgga

SEQ ID NO: 3934 - DNA, 24 bp, Artificial Sequence
  Description of Artificial Sequence: Synthetic probe
ttagcaacaggcacaggagacact

SEQ ID NO: 3935 - DNA, 20 bp, Artificial Sequence
  Description of Artificial Sequence: Synthetic primer
ttctaggcgacacgacaaca

SEQ ID NO: 3936 - DNA, 19 bp, Artificial Sequence
  Description of Artificial Sequence: Synthetic primer
tccacggacagtacccaca

SEQ ID NO: 3937 - DNA, 46 bp, Artificial Sequence
  Description of Artificial Sequence: Synthetic primer
  Description of Combined DNA/RNA Molecule: Synthetic primer
tccacggacagtacccacactgatgcctccagatgcctgttgctgt

SEQ ID NO: 3938 - DNA, 39 bp, Artificial Sequence
  Description of Artificial Sequence: Synthetic primer
  Description of Combined DNA/RNA Molecule: Synthetic primer
acgacgacgacgaacccagctgcacagacctgcaggtgt

SEQ ID NO: 3939 - DNA, 38 bp, Artificial Sequence
  Description of Artificial Sequence: Synthetic primer
  Description of Combined DNA/RNA Molecule: Synthetic primer
acgacgacgacgaagcagggtcccagctgcacagaccc

SEQ ID NO: 3940 - DNA, 53 bp, Artificial Sequence
  Description of Artificial Sequence: Synthetic primer
  Description of Combined DNA/RNA Molecule: Synthetic primer
acgacgacgacttgacgaacataatcccaggaagtgcctgatctggtauttct

SEQ ID NO: 3941 - DNA, 43 bp, Artificial Sequence
  Description of Artificial Sequence: Synthetic oligonucleotide
  Description of Combined DNA/RNA Molecule: Synthetic oligonucleotide
tttcaggccctaaccaccacggtgcccacccacccgcaccctg

SEQ ID NO: 3942 - DNA, 52 bp, Artificial Sequence
  Description of Artificial Sequence: Synthetic oligonucleotide
ccccacactcccatacttgacctgtgtggatggtgggattaagggcgatgga

SEQ ID NO: 3943 - DNA, 21 bp, Artificial Sequence
  Description of Artificial Sequence: Synthetic probe
ttacccgcaccccacactccc

SEQ ID NO: 3944 - DNA, 20 bp, Artificial Sequence
  Description of Artificial Sequence: Synthetic primer
tttcaggccctaaccaccac

SEQ ID NO: 3945 - DNA, 20 bp, Artificial Sequence
  Description of Artificial Sequence: Synthetic primer
tccatcgcccttaatcccac

SEQ ID NO: 3946 - DNA, 52 bp, Artificial Sequence
  Description of Artificial Sequence: Synthetic primer
  Description of Combined DNA/RNA Molecule: Synthetic primer
tccatcgcccttaatcccaccaggaagtgcctgatctggtatttcttggagg

SEQ ID NO: 3947 - DNA, 41 bp, Artificial Sequence
  Description of Artificial Sequence: Synthetic primer
  Description of Combined DNA/RNA Molecule: Synthetic primer
acgacgacgacgaaggacctaggtatgaggccaccauaata

SEQ ID NO: 3948 - DNA, 43 bp, Artificial Sequence
  Description of Artificial Sequence: Synthetic primer
  Description of Combined DNA/RNA Molecule: Synthetic primer
acgacgacgacgaactgtcccagacagggacctaggtauggga

SEQ ID NO: 3949 - DNA, 59 bp, Artificial Sequence
  Description of Artificial Sequence: Synthetic primer
  Description of Combined DNA/RNA Molecule: Synthetic primer
acgacgacgacttgacgaacataatgggcttgggttttgtgatctttaagtgacugcta

SEQ ID NO: 3950 - DNA, 60 bp, Artificial Sequence
  Description of Artificial Sequence: Synthetic oligonucleotide
  Description of Combined DNA/RNA Molecule: Synthetic oligonucleotide
tatctcctaaaagaagccgcacaatggaaaggattccttaaacatactcaccgcagcaaa

SEQ ID NO: 3951 - DNA, 46 bp, Artificial Sequence
  Description of Artificial Sequence: Synthetic oligonucleotide
gcaggagagctgagagcatggccagggtgggattaagggcgatgga

SEQ ID NO: 3952 - DNA, 25 bp, Artificial Sequence
  Description of Artificial Sequence: Synthetic probe
aacaccgcagcaggagagctgagag

SEQ ID NO: 3953 - DNA, 22 bp, Artificial Sequence
  Description of Artificial Sequence: Synthetic primer
tatctcctaaaagaagccgcac

SEQ ID NO: 3954 - DNA, 20 bp, Artificial Sequence
  Description of Artificial Sequence: Synthetic primer
tccatcgcccttaatcccac

SEQ ID NO: 3955 - DNA, 48 bp, Artificial Sequence
  Description of Artificial Sequence: Synthetic primer
  Description of Combined DNA/RNA Molecule: Synthetic primer
tccatcgcccttaatcccacgtgactgaggcagatccccatatggcat

SEQ ID NO: 3956 - DNA, 38 bp, Artificial Sequence
  Description of Artificial Sequence: Synthetic primer
  Description of Combined DNA/RNA Molecule: Synthetic primer
acgacgacgacgaacagcactggccaggctccaggaga

SEQ ID NO: 3957 - DNA, 38 bp, Artificial Sequence
  Description of Artificial Sequence: Synthetic primer
  Description of Combined DNA/RNA Molecule: Synthetic primer
acgacgacgacgaactcacagcactggccaggcuccaa

SEQ ID NO: 3958 - DNA, 47 bp, Artificial Sequence
  Description of Artificial Sequence: Synthetic primer
  Description of Combined DNA/RNA Molecule: Synthetic primer
acgacgacgacttgacgaacataatgctgcccctgccactgcctggc

SEQ ID NO: 3959 - DNA, 42 bp, Artificial Sequence
  Description of Artificial Sequence: Synthetic oligonucleotide
  Description of Combined DNA/RNA Molecule: Synthetic oligonucleotide
tcgctcttcagcctcctacaggccccagcaggtgacagcatg

SEQ ID NO: 3960 - DNA, 46 bp, Artificial Sequence
  Description of Artificial Sequence: Synthetic oligonucleotide
gcacaggagcccaaggagacagactgttctgggaattattgccgga

SEQ ID NO: 3961 - DNA, 25 bp, Artificial Sequence
  Description of Artificial Sequence: Synthetic probe
aaggtgacagcacaggagcccaagg

SEQ ID NO: 3962 - DNA, 20 bp, Artificial Sequence
  Description of Artificial Sequence: Synthetic primer
tcgctcttcagcctcctaca

SEQ ID NO: 3963 - DNA, 22 bp, Artificial Sequence
  Description of Artificial Sequence: Synthetic primer
tccggcaataattcccagaaca

SEQ ID NO: 3964 - DNA, 44 bp, Artificial Sequence
  Description of Artificial Sequence: Synthetic primer
  Description of Combined DNA/RNA Molecule: Synthetic primer
tccggcaataattcccagaacatgcccctgccactgcttggtcc

SEQ ID NO: 3965 - DNA, 38 bp, Artificial Sequence
  Description of Artificial Sequence: Synthetic primer
  Description of Combined DNA/RNA Molecule: Synthetic primer
acgacgacgacgaacccctatccacaccccccagacta

SEQ ID NO: 3966 - DNA, 40 bp, Artificial Sequence
  Description of Artificial Sequence: Synthetic primer
  Description of Combined DNA/RNA Molecule: Synthetic primer
acgacgacgacgaaccctatccacaccccccagacuggcg

SEQ ID NO: 3967 - DNA, 51 bp, Artificial Sequence
  Description of Artificial Sequence: Synthetic primer
  Description of Combined DNA/RNA Molecule: Synthetic primer
acgacgacgacttgacgaacataatgtgaggattgcctgtggtgtcaaggc

SEQ ID NO: 3968 - DNA, 43 bp, Artificial Sequence
  Description of Artificial Sequence: Synthetic oligonucleotide
  Description of Combined DNA/RNA Molecule: Synthetic oligonucleotide
ttcaacgatcgcgcagacatctggaagcccaggccgcagcatt

SEQ ID NO: 3969 - DNA, 53 bp, Artificial Sequence
  Description of Artificial Sequence: Synthetic oligonucleotide
gcacctaccacaaaaccttctcccaccacagtgttctgggaattattgccgga

SEQ ID NO: 3970 - DNA, 25 bp, Artificial Sequence
  Description of Artificial Sequence: Synthetic probe
ttggccgcagcacctaccacaaaac

SEQ ID NO: 3971 - DNA, 19 bp, Artificial Sequence
  Description of Artificial Sequence: Synthetic primer
ttcaacgatcgcgcagaca

SEQ ID NO: 3972 - DNA, 22 bp, Artificial Sequence
  Description of Artificial Sequence: Synthetic primer
tccggcaataattcccagaaca

SEQ ID NO: 3973 - DNA, 50 bp, Artificial Sequence
  Description of Artificial Sequence: Synthetic primer
  Description of Combined DNA/RNA Molecule: Synthetic primer
tccggcaataattcccagaacatgtcaaggtcatgggactgtgatgggaa

SEQ ID NO: 3974 - DNA, 41 bp, Artificial Sequence
  Description of Artificial Sequence: Synthetic primer
  Description of Combined DNA/RNA Molecule: Synthetic primer
acgacgacgacgaagcagagactcaggagaggaccactggt

SEQ ID NO: 3975 - DNA, 42 bp, Artificial Sequence
  Description of Artificial Sequence: Synthetic primer
  Description of Combined DNA/RNA Molecule: Synthetic primer
acgacgacgacgaaccagcaggagcagagactcaggagggaa

SEQ ID NO: 3976 - DNA, 52 bp, Artificial Sequence
  Description of Artificial Sequence: Synthetic primer
  Description of Combined DNA/RNA Molecule: Synthetic primer
acgacgacgacttgacgaacataatccccactccctcatctgtgaccctgta

SEQ ID NO: 3977 - DNA, 45 bp, Artificial Sequence
  Description of Artificial Sequence: Synthetic oligonucleotide
  Description of Combined DNA/RNA Molecule: Synthetic oligonucleotide
tcactatcggcgtagtcaccaggcaccctgctggagttcagaatg

SEQ ID NO: 3978 - DNA, 47 bp, Artificial Sequence
  Description of Artificial Sequence: Synthetic oligonucleotide
gaacaagggtggtcagggtcacctccctggtgactttacccggagga

SEQ ID NO: 3979 - DNA, 30 bp, Artificial Sequence
  Description of Artificial Sequence: Synthetic probe
aagagttcagaacaagggtggtcagggtca

SEQ ID NO: 3980 - DNA, 21 bp, Artificial Sequence
  Description of Artificial Sequence: Synthetic primer
tcactatcggcgtagtcacca

SEQ ID NO: 3981 - DNA, 20 bp, Artificial Sequence
  Description of Artificial Sequence: Synthetic primer
tcctccgggtaaagtcacca

SEQ ID NO: 3982 - DNA, 47 bp, Artificial Sequence
  Description of Artificial Sequence: Synthetic primer
  Description of Combined DNA/RNA Molecule: Synthetic primer
tcctccgggtaaagtcaccaccactccctcatctgtgaccttgtgga

SEQ ID NO: 3983 - DNA, 42 bp, Artificial Sequence
  Description of Artificial Sequence: Synthetic primer
  Description of Combined DNA/RNA Molecule: Synthetic primer
acgacgacgacgaatcttgtcacaggcacctttggcaaggtt

SEQ ID NO: 3984 - DNA, 41 bp, Artificial Sequence
  Description of Artificial Sequence: Synthetic primer
  Description of Combined DNA/RNA Molecule: Synthetic primer
acgacgacgacgaacacaggcacctttggcaaggtcactgt

SEQ ID NO: 3985 - DNA, 53 bp, Artificial Sequence
  Description of Artificial Sequence: Synthetic primer
  Description of Combined DNA/RNA Molecule: Synthetic primer
acgacgacgacttgacgaacataatcccctttgtgtctggctatggccugggc

SEQ ID NO: 3986 - DNA, 52 bp, Artificial Sequence
  Description of Artificial Sequence: Synthetic oligonucleotide
  Description of Combined DNA/RNA Molecule: Synthetic oligonucleotide
tcatctgttcgtcagggtccacagggatgttttggtcataggagacacagaa

SEQ ID NO: 3987 - DNA, 46 bp, Artificial Sequence
  Description of Artificial Sequence: Synthetic oligonucleotide
cagggcaggttgccataggcatcagctggtgactttacccggagga

SEQ ID NO: 3988 - DNA, 26 bp, Artificial Sequence
  Description of Artificial Sequence: Synthetic probe
ccggagacacagggcaggttgccata

SEQ ID NO: 3989 - DNA, 21 bp, Artificial Sequence
  Description of Artificial Sequence: Synthetic primer
tcatctgttcgtcagggtcca

SEQ ID NO: 3990 - DNA, 20 bp, Artificial Sequence
  Description of Artificial Sequence: Synthetic primer
tcctccgggtaaagtcacca

SEQ ID NO: 3991 - DNA, 46 bp, Artificial Sequence
  Description of Artificial Sequence: Synthetic primer
  Description of Combined DNA/RNA Molecule: Synthetic primer
tcctccgggtaaagtcaccaggctatggcctgggtgctggtgcctg

SEQ ID NO: 3992 - DNA, 47 bp, Artificial Sequence
  Description of Artificial Sequence: Synthetic primer
  Description of Combined DNA/RNA Molecule: Synthetic primer
acgacgacgacgaagacctatttgcagtcatcattggctgcagctga

SEQ ID NO: 3993 - DNA, 52 bp, Artificial Sequence
  Description of Artificial Sequence: Synthetic primer
  Description of Combined DNA/RNA Molecule: Synthetic primer
acgacgacgacgaacctttttatgacctatttgcagtcatcattggcugcaa

SEQ ID NO: 3994 - DNA, 57 bp, Artificial Sequence
  Description of Artificial Sequence: Synthetic primer
  Description of Combined DNA/RNA Molecule: Synthetic primer
acgacgacgacttgacgaacataatgaaagcagaatgtggagggaaatttgcuggga

SEQ ID NO: 3995 - DNA, 45 bp, Artificial Sequence
  Description of Artificial Sequence: Synthetic oligonucleotide
  Description of Combined DNA/RNA Molecule: Synthetic oligonucleotide
ttcgtacctcggcacaccagctggtcatgtgcaggcatcactcgt

SEQ ID NO: 3996 - DNA, 52 bp, Artificial Sequence
  Description of Artificial Sequence: Synthetic oligonucleotide
ctcaccttcacagcctttttcctgatttcccctggctccgttactctgtcga

SEQ ID NO: 3997 - DNA, 31 bp, Artificial Sequence
  Description of Artificial Sequence: Synthetic probe
ttggcatcactcaccttcacagcctttttcc

SEQ ID NO: 3998 - DNA, 19 bp, Artificial Sequence
  Description of Artificial Sequence: Synthetic primer
ttcgtacctcggcacacca

SEQ ID NO: 3999 - DNA, 20 bp, Artificial Sequence
  Description of Artificial Sequence: Synthetic primer
tcgacagagtaacggagcca

SEQ ID NO: 4000 - DNA, 49 bp, Artificial Sequence
  Description of Artificial Sequence: Synthetic primer
  Description of Combined DNA/RNA Molecule: Synthetic primer
tcgacagagtaacggagccagcagaatgtggagggaaatttgttgggag

SEQ ID NO: 4001 - DNA, 40 bp, Artificial Sequence
  Description of Artificial Sequence: Synthetic primer
  Description of Combined DNA/RNA Molecule: Synthetic primer
acgacgacgacgaacactcccagagacaccacccaugccg

SEQ ID NO: 4002 - DNA, 41 bp, Artificial Sequence
  Description of Artificial Sequence: Synthetic primer
  Description of Combined DNA/RNA Molecule: Synthetic primer
acgacgacgacgaactgcactcccagagacaccacccatgt

SEQ ID NO: 4003 - DNA, 56 bp, Artificial Sequence
  Description of Artificial Sequence: Synthetic primer
  Description of Combined DNA/RNA Molecule: Synthetic primer
acgacgacgacttgacgaacataattgttctgatggctgagagtgagggacatgga

SEQ ID NO: 4004 - DNA, 49 bp, Artificial Sequence
  Description of Artificial Sequence: Synthetic oligonucleotide
  Description of Combined DNA/RNA Molecule: Synthetic oligonucleotide
tctacagctagatgcggccacatgtcaggttgtccccaagtacacttat

SEQ ID NO: 4005 - DNA, 51 bp, Artificial Sequence
  Description of Artificial Sequence: Synthetic oligonucleotide
cttgccatgagtttctgccacatgactcacctggctccgttactctgtcga

SEQ ID NO: 4006 - DNA, 30 bp, Artificial Sequence
  Description of Artificial Sequence: Synthetic probe
ttaagtacacttgccatgagtttctgccac

SEQ ID NO: 4007 - DNA, 20 bp, Artificial Sequence
  Description of Artificial Sequence: Synthetic primer
tctacagctagatgcggcca

SEQ ID NO: 4008 - DNA, 20 bp, Artificial Sequence
  Description of Artificial Sequence: Synthetic primer
tcgacagagtaacggagcca

SEQ ID NO: 4009 - DNA, 52 bp, Artificial Sequence
  Description of Artificial Sequence: Synthetic primer
  Description of Combined DNA/RNA Molecule: Synthetic primer
tcgacagagtaacggagccagttctgatggctgagagtgagggacgtgggta

SEQ ID NO: 4010 - DNA, 43 bp, Artificial Sequence
  Description of Artificial Sequence: Synthetic primer
  Description of Combined DNA/RNA Molecule: Synthetic primer
acgacgacgacgaacacacccaggctgaatggtagacautcta

SEQ ID NO: 4011 - DNA, 37 bp, Artificial Sequence
  Description of Artificial Sequence: Synthetic primer
  Description of Combined DNA/RNA Molecule: Synthetic primer
acgacgacgacgaaccccacacacacccaggcugaac

SEQ ID NO: 4012 - DNA, 50 bp, Artificial Sequence
  Description of Artificial Sequence: Synthetic primer
  Description of Combined DNA/RNA Molecule: Synthetic primer
acgacgacgacttgacgaacataatgaggtgctgcaaggtgaggcuggga

SEQ ID NO: 4013 - DNA, 45 bp, Artificial Sequence
  Description of Artificial Sequence: Synthetic oligonucleotide
  Description of Combined DNA/RNA Molecule: Synthetic oligonucleotide
tagcgatagtaccgacagtcacaccaggcagcagccatcagctaa

SEQ ID NO: 4014 - DNA, 46 bp, Artificial Sequence
  Description of Artificial Sequence: Synthetic oligonucleotide
gctggttcccacttccacacacacccgtgcggaaacctatcgtcga

SEQ ID NO: 4015 - DNA, 25 bp, Artificial Sequence
  Description of Artificial Sequence: Synthetic probe
ttgccatcagctggttcccacttcc

SEQ ID NO: 4016 - DNA, 22 bp, Artificial Sequence
  Description of Artificial Sequence: Synthetic primer
tagcgatagtaccgacagtcac

SEQ ID NO: 4017 - DNA, 20 bp, Artificial Sequence
  Description of Artificial Sequence: Synthetic primer
tcgacgataggtttccgcac

SEQ ID NO: 4018 - DNA, 53 bp, Artificial Sequence
  Description of Artificial Sequence: Synthetic primer
  Description of Combined DNA/RNA Molecule: Synthetic primer
tcgacgataggtttccgcaccctctagaacacagtttaagaggtgtatgtggg

SEQ ID NO: 4019 - DNA, 37 bp, Artificial Sequence; identical to SEQ ID NO: 915
  Description of Artificial Sequence: Synthetic primer
  Description of Combined DNA/RNA Molecule: Synthetic primer

SEQ ID NO: 4020 - DNA, 41 bp, Artificial Sequence
  Description of Artificial Sequence: Synthetic primer
  Description of Combined DNA/RNA Molecule: Synthetic primer
acgacgacgacgaacactctcttccctgcagcagcagagcg

SEQ ID NO: 4021 - DNA, 51 bp, Artificial Sequence
  Description of Artificial Sequence: Synthetic primer
  Description of Combined DNA/RNA Molecule: Synthetic primer
acgacgacgacttgacgaacataatgctcatggcagccagtgggaaagtga

SEQ ID NO: 4022 - DNA, 41 bp, Artificial Sequence
  Description of Artificial Sequence: Synthetic oligonucleotide
  Description of Combined DNA/RNA Molecule: Synthetic oligonucleotide
tccagggtatttggcgcacggtgccagcagcagacaugcga

SEQ ID NO: 4023 - DNA, 45 bp, Artificial Sequence
  Description of Artificial Sequence: Synthetic oligonucleotide
tgcagcacatcagccaccagcacttgtgcggaaacctatcgtcga

SEQ ID NO: 4024 - DNA, 26 bp, Artificial Sequence
  Description of Artificial Sequence: Synthetic probe
ttgcagacatgcagcacatcagccac

SEQ ID NO: 4025 - DNA, 19 bp, Artificial Sequence
  Description of Artificial Sequence: Synthetic primer
tccagggtatttggcgcac

SEQ ID NO: 4026 - DNA, 20 bp, Artificial Sequence
  Description of Artificial Sequence: Synthetic primer
tcgacgataggtttccgcac

SEQ ID NO: 4027 - DNA, 47 bp, Artificial Sequence
  Description of Artificial Sequence: Synthetic primer
  Description of Combined DNA/RNA Molecule: Synthetic primer
tcgacgataggtttccgcacgggaaagtggccaggaagtgttggtga

SEQ ID NO: 4028 - DNA, 43 bp, Artificial Sequence
  Description of Artificial Sequence: Synthetic primer
  Description of Combined DNA/RNA Molecule: Synthetic primer
acgacgacgacgaactccagctggaagctgctctctcacctcc

SEQ ID NO: 4029 - DNA, 39 bp, Artificial Sequence
  Description of Artificial Sequence: Synthetic primer
  Description of Combined DNA/RNA Molecule: Synthetic primer
acgacgacgacgaagcccacctccagctggaagcugctt

SEQ ID NO: 4030 - DNA, 62 bp, Artificial Sequence
  Description of Artificial Sequence: Synthetic primer
  Description of Combined DNA/RNA Molecule: Synthetic primer
acgacgacgacttgacgaacataatgatcaactcaaactatgttgaccccaagttccctccg

SEQ ID NO: 4031 - DNA, 48 bp, Artificial Sequence
  Description of Artificial Sequence: Synthetic oligonucleotide
  Description of Combined DNA/RNA Molecule: Synthetic oligonucleotide
tccctcgtcatctcccttaccccaccagcatagtacccagacaagtat

SEQ ID NO: 4032 - DNA, 52 bp, Artificial Sequence
  Description of Artificial Sequence: Synthetic oligonucleotide
agtggtcactgggtaggtaatcactctgtgaatggtcttggtgatggagcga

SEQ ID NO: 4033 - DNA, 35 bp, Artificial Sequence
  Description of Artificial Sequence: Synthetic probe
ttccagacaagtggtcactgggtaggtaatcactc

SEQ ID NO: 4034 - DNA, 21 bp, Artificial Sequence
  Description of Artificial Sequence: Synthetic primer
tccctcgtcatctcccttacc

SEQ ID NO: 4035 - DNA, 19 bp, Artificial Sequence
  Description of Artificial Sequence: Synthetic primer
tcgctccatcaccaagacc

SEQ ID NO: 4036 - DNA, 48 bp, Artificial Sequence
  Description of Artificial Sequence: Synthetic primer
  Description of Combined DNA/RNA Molecule: Synthetic primer
tcgctccatcaccaagaccgttgaccccaagttccctccatatgaggg

SEQ ID NO: 4037 - DNA, 45 bp, Artificial Sequence
  Description of Artificial Sequence: Synthetic primer
  Description of Combined DNA/RNA Molecule: Synthetic primer
acgacgacgacgaacaagtgaacaaagttaggcacccacaugatt

SEQ ID NO: 4038 - DNA, 49 bp, Artificial Sequence
  Description of Artificial Sequence: Synthetic primer
  Description of Combined DNA/RNA Molecule: Synthetic primer
acgacgacgacgaacttactgtcaagtgaacaaagttaggcacccacac

SEQ ID NO: 4039 - DNA, 50 bp, Artificial Sequence
  Description of Artificial Sequence: Synthetic primer
  Description of Combined DNA/RNA Molecule: Synthetic primer
acgacgacgacttgacgaacataatctggagtgaggtctgggtgagcagg

SEQ ID NO: 4040 - DNA, 49 bp, Artificial Sequence
  Description of Artificial Sequence: Synthetic oligonucleotide
  Description of Combined DNA/RNA Molecule: Synthetic oligonucleotide
tcataatgttgtcagcccgacctgatcctccaagccaatggtcaccctg

SEQ ID NO: 4041 - DNA, 52 bp, Artificial Sequence
  Description of Artificial Sequence: Synthetic oligonucleotide
ccccacctgcaattcccagataaggaaatctgcggtcttggtgatggagcga

SEQ ID NO: 4042 - DNA, 25 bp, Artificial Sequence
  Description of Artificial Sequence: Synthetic probe
ttatggtcaccccacctgcaattcc

SEQ ID NO: 4043 - DNA, 22 bp, Artificial Sequence
  Description of Artificial Sequence: Synthetic primer
tcataatgttgtcagcccgacc

SEQ ID NO: 4044 - DNA, 19 bp, Artificial Sequence
  Description of Artificial Sequence: Synthetic primer
tcgctccatcaccaagacc

SEQ ID NO: 4045 - DNA, 51 bp, Artificial Sequence
  Description of Artificial Sequence: Synthetic primer
  Description of Combined DNA/RNA Molecule: Synthetic primer
tcgctccatcaccaagaccggtctgggtgagcagatttccttatttgggag

SEQ ID NO: 4046 - DNA, 42 bp, Artificial Sequence
  Description of Artificial Sequence: Synthetic primer
  Description of Combined DNA/RNA Molecule: Synthetic primer
acgacgacgacgaagcaccctaaggccactgatcacauctgc

SEQ ID NO: 4047 - DNA, 41 bp, Artificial Sequence
  Description of Artificial Sequence: Synthetic primer
  Description of Combined DNA/RNA Molecule: Synthetic primer
acgacgacgacgaagggcaccctaaggccactgatcacatt

SEQ ID NO: 4048 - DNA, 54 bp, Artificial Sequence
  Description of Artificial Sequence: Synthetic primer
  Description of Combined DNA/RNA Molecule: Synthetic primer
acgacgacgacttgacgaacataattccttccacttcttgcctttggccagtga

SEQ ID NO: 4049 - DNA, 47 bp, Artificial Sequence
  Description of Artificial Sequence: Synthetic oligonucleotide
  Description of Combined DNA/RNA Molecule: Synthetic oligonucleotide
tacgaatcacccgagagttcaagacccttgtggcccaggccacccgt

SEQ ID NO: 4050 - DNA, 53 bp, Artificial Sequence
  Description of Artificial Sequence: Synthetic oligonucleotide
cccacagcctcatcttggcaggatttacaccttgtgggtgggtataggtcaga

SEQ ID NO: 4051 - DNA, 26 bp, Artificial Sequence
  Description of Artificial Sequence: Synthetic probe
ttcaggccacccacagcctcatcttg

SEQ ID NO: 4052 - DNA, 22 bp, Artificial Sequence
  Description of Artificial Sequence: Synthetic primer
tacgaatcacccgagagttcaa

SEQ ID NO: 4053 - DNA, 22 bp, Artificial Sequence
  Description of Artificial Sequence: Synthetic primer
tctgacctatacccacccacaa

SEQ ID NO: 4054 - DNA, 46 bp, Artificial Sequence
  Description of Artificial Sequence: Synthetic primer
  Description of Combined DNA/RNA Molecule: Synthetic primer
tctgacctatacccacccacaagcctttggccagtggtgatgtaag

SEQ ID NO: 4055 - DNA, 45 bp, Artificial Sequence
  Description of Artificial Sequence: Synthetic primer
  Description of Combined DNA/RNA Molecule: Synthetic primer
acgacgacgacgaacacctaataagttgccagcacccacacccct

SEQ ID NO: 4056 - DNA, 45 bp, Artificial Sequence
  Description of Artificial Sequence: Synthetic primer
  Description of Combined DNA/RNA Molecule: Synthetic primer
acgacgacgacgaacagtcacctaataagttgccagcacccacat

SEQ ID NO: 4057 - DNA, 61 bp, Artificial Sequence
  Description of Artificial Sequence: Synthetic primer
  Description of Combined DNA/RNA Molecule: Synthetic primer
acgacgacgacttgacgaacataatgcaaaacattggaccattaatagtgtgtggagtgac

SEQ ID NO: 4058 - DNA, 46 bp, Artificial Sequence
  Description of Artificial Sequence: Synthetic oligonucleotide
  Description of Combined DNA/RNA Molecule: Synthetic oligonucleotide
tacgaatcacccgagagttcaacccccattggccatgcgcaucatg

SEQ ID NO: 4059 - DNA, 56 bp, Artificial Sequence
  Description of Artificial Sequence: Synthetic oligonucleotide
tcacatgcccatccagcagaacaataacacataattgtgggtgggtataggtcaga

SEQ ID NO: 4060 - DNA, 25 bp, Artificial Sequence
  Description of Artificial Sequence: Synthetic probe
ttatgcgcatcacatgcccatccag

SEQ ID NO: 4061 - DNA, 22 bp, Artificial Sequence
  Description of Artificial Sequence: Synthetic primer
tacgaatcacccgagagttcaa

SEQ ID NO: 4062 - DNA, 22 bp, Artificial Sequence
  Description of Artificial Sequence: Synthetic primer
tctgacctatacccacccacaa

SEQ ID NO: 4063 - DNA, 62 bp, Artificial Sequence
  Description of Artificial Sequence: Synthetic primer
  Description of Combined DNA/RNA Molecule: Synthetic primer
tctgacctatacccacccacaaattggaccattaatagtgtgtggagtgatttatatgttac

SEQ ID NO: 4064 - DNA, 45 bp, Artificial Sequence; identical to SEQ ID NO: 4055
  Description of Artificial Sequence: Synthetic primer
  Description of Combined DNA/RNA Molecule: Synthetic primer

SEQ ID NO: 4065 - DNA, 45 bp, Artificial Sequence; identical to SEQ ID NO: 4056
  Description of Artificial Sequence: Synthetic primer
  Description of Combined DNA/RNA Molecule: Synthetic primer

SEQ ID NO: 4066 - DNA, 63 bp, Artificial Sequence
  Description of Artificial Sequence: Synthetic primer
  Description of Combined DNA/RNA Molecule: Synthetic primer
acgacgacgacttgacgaacataatatgactgcaaaacattggaccattaatagtgtguggaa

SEQ ID NO: 4067 - DNA, 48 bp, Artificial Sequence
  Description of Artificial Sequence: Synthetic oligonucleotide
  Description of Combined DNA/RNA Molecule: Synthetic oligonucleotide
taggaacacggaggacatcaacccattggccatgcacatcgcaugctt

SEQ ID NO: 4068 - DNA, 58 bp, Artificial Sequence
  Description of Artificial Sequence: Synthetic oligonucleotide
tgcccatccagcagaacaataacacataaatcactcttgtgggtgggtataggtcaga

SEQ ID NO: 4069 - DNA, 32 bp, Artificial Sequence
  Description of Artificial Sequence: Synthetic probe
ttcatcgcatgcccatccagcagaacaataac

SEQ ID NO: 4070 - DNA, 21 bp, Artificial Sequence
  Description of Artificial Sequence: Synthetic primer
taggaacacggaggacatcaa

SEQ ID NO: 4071 - DNA, 22 bp, Artificial Sequence
  Description of Artificial Sequence: Synthetic primer
tctgacctatacccacccacaa

SEQ ID NO: 4072 - DNA, 61 bp, Artificial Sequence
  Description of Artificial Sequence: Synthetic primer
  Description of Combined DNA/RNA Molecule: Synthetic primer
tctgacctatacccacccacaacattggaccattaatagtgtgtggagtgatttgtgttac

SEQ ID NO: 4073 - DNA, 43 bp, Artificial Sequence
  Description of Artificial Sequence: Synthetic primer
  Description of Combined DNA/RNA Molecule: Synthetic primer
acgacgacgacgaactggtggcttgtccaatttgcacagtgat

SEQ ID NO: 4074 - DNA, 45 bp, Artificial Sequence
  Description of Artificial Sequence: Synthetic primer
  Description of Combined DNA/RNA Molecule: Synthetic primer
acgacgacgacgaagtggcttgtccaatttgcacagtgacutgac

SEQ ID NO: 4075 - DNA, 57 bp, Artificial Sequence
  Description of Artificial Sequence: Synthetic primer
  Description of Combined DNA/RNA Molecule: Synthetic primer
acgacgacgacttgacgaacataatgtgacaaactgtgaggagaagctgttcuggcc

SEQ ID NO: 4076 - DNA, 55 bp, Artificial Sequence
  Description of Artificial Sequence: Synthetic oligonucleotide
  Description of Combined DNA/RNA Molecule: Synthetic oligonucleotide
tctcataaacactccggccacctctctcattcatggtcacttccaaaacacttcg

SEQ ID NO: 4077 - DNA, 53 bp, Artificial Sequence
  Description of Artificial Sequence: Synthetic oligonucleotide
ctttagtgccttccatccctaaaccaccaacaggtggctcaataacgggcaga

SEQ ID NO: 4078 - DNA, 33 bp, Artificial Sequence
  Description of Artificial Sequence: Synthetic probe
aacaaaacactttagtgccttccatccctaaac

SEQ ID NO: 4079 - DNA, 21 bp, Artificial Sequence
  Description of Artificial Sequence: Synthetic primer
tctcataaacactccggccac

SEQ ID NO: 4080 - DNA, 20 bp, Artificial Sequence
  Description of Artificial Sequence: Synthetic primer
tctgcccgttattgagccac

SEQ ID NO: 4081 - DNA, 49 bp, Artificial Sequence
  Description of Artificial Sequence: Synthetic primer
  Description of Combined DNA/RNA Molecule: Synthetic primer
tctgcccgttattgagccacggagaagctgttctggctgttgatggttc

SEQ ID NO: 4082 - DNA, 40 bp, Artificial Sequence
  Description of Artificial Sequence: Synthetic primer
  Description of Combined DNA/RNA Molecule: Synthetic primer
acgacgacgacgaactggagcactctctgtgcccagaccc

SEQ ID NO: 4083 - DNA, 41 bp, Artificial Sequence
  Description of Artificial Sequence: Synthetic primer
  Description of Combined DNA/RNA Molecule: Synthetic primer
acgacgacgacgaagagcactctctgtgcccagaccutgtg

SEQ ID NO: 4084 - DNA, 66 bp, Artificial Sequence
  Description of Artificial Sequence: Synthetic primer
  Description of Combined DNA/RNA Molecule: Synthetic primer
acgacgacgacttgacgaacataatctataaatagttgtgcatcttgaaacaaaagtttgcaacta

SEQ ID NO: 4085 - DNA, 46 bp, Artificial Sequence
  Description of Artificial Sequence: Synthetic oligonucleotide
  Description of Combined DNA/RNA Molecule: Synthetic oligonucleotide
ttgattgggatcgttcgcaccccacagcccaggaaaccgcaggctc

SEQ ID NO: 4086 - DNA, 45 bp, Artificial Sequence
  Description of Artificial Sequence: Synthetic oligonucleotide
ggcctcacagcatctggctgcagttgtggctcaataacgggcaga

SEQ ID NO: 4087 - DNA, 22 bp, Artificial Sequence
  Description of Artificial Sequence: Synthetic probe
ttaaccgcaggcctcacagcat

SEQ ID NO: 4088 - DNA, 20 bp, Artificial Sequence
  Description of Artificial Sequence: Synthetic primer
ttgattgggatcgttcgcac

SEQ ID NO: 4089 - DNA, 20 bp, Artificial Sequence
  Description of Artificial Sequence: Synthetic primer
tctgcccgttattgagccac

SEQ ID NO: 4090 - DNA, 55 bp, Artificial Sequence
  Description of Artificial Sequence: Synthetic primer
  Description of Combined DNA/RNA Molecule: Synthetic primer
tctgcccgttattgagccacttgtgcatcttgaaacaaaagtttgcaattgcagt

SEQ ID NO: 4091 - DNA, 46 bp, Artificial Sequence
  Description of Artificial Sequence: Synthetic primer
  Description of Combined DNA/RNA Molecule: Synthetic primer
acgacgacgacgaagcagcatttcatttaaaggctgcctcaatccg

SEQ ID NO: 4092 - DNA, 48 bp, Artificial Sequence
  Description of Artificial Sequence: Synthetic primer
  Description of Combined DNA/RNA Molecule: Synthetic primer
acgacgacgacgaaagcatttcatttaaaggctgcctcaatccagtga

SEQ ID NO: 4093 - DNA, 70 bp, Artificial Sequence
  Description of Artificial Sequence: Synthetic primer
  Description of Combined DNA/RNA Molecule: Synthetic primer
acgacgacgacttgacgaacataatcaaaaaaagttgaagtataataataggaaaactgggtttcugcaa

SEQ ID NO: 4094 - DNA, 60 bp, Artificial Sequence
  Description of Artificial Sequence: Synthetic oligonucleotide
  Description of Combined DNA/RNA Molecule: Synthetic oligonucleotide
tctgcccaaaatactgcacaaccagtgacttgtgcaaaagaaaactattcaaccactgcc

SEQ ID NO: 4095 - DNA, 53 bp, Artificial Sequence
  Description of Artificial Sequence: Synthetic oligonucleotide
ctgtttgccctttcagcattttcctcagctgcttgaaactgaggcggtgttca

SEQ ID NO: 4096 - DNA, 33 bp, Artificial Sequence
  Description of Artificial Sequence: Synthetic probe
cctcaaccactgtttgccctttcagcattttcc

SEQ ID NO: 4097 - DNA, 21 bp, Artificial Sequence
  Description of Artificial Sequence: Synthetic primer
tctgcccaaaatactgcacaa

SEQ ID NO: 4098 - DNA, 21 bp, Artificial Sequence
  Description of Artificial Sequence: Synthetic primer
tgaacaccgcctcagtttcaa

SEQ ID NO: 4099 - DNA, 55 bp, Artificial Sequence
  Description of Artificial Sequence: Synthetic primer
  Description of Combined DNA/RNA Molecule: Synthetic primer
tgaacaccgcctcagtttcaaaataataggaaaactgggtttctgcagttgaggg

SEQ ID NO: 4100 - DNA, 45 bp, Artificial Sequence
  Description of Artificial Sequence: Synthetic primer
  Description of Combined DNA/RNA Molecule: Synthetic primer
acgacgacgacgaagcctgaactttcacctctcaaacccaggcct

SEQ ID NO: 4101 - DNA, 45 bp, Artificial Sequence
  Description of Artificial Sequence: Synthetic primer
  Description of Combined DNA/RNA Molecule: Synthetic primer
acgacgacgacgaagaactttcacctctcaaacccaggcccagct

SEQ ID NO: 4102 - DNA, 47 bp, Artificial Sequence
  Description of Artificial Sequence: Synthetic primer
  Description of Combined DNA/RNA Molecule: Synthetic primer
acgacgacgacttgacgaacataatccctgggccaccaacccatccc

SEQ ID NO: 4103 - DNA, 44 bp, Artificial Sequence
  Description of Artificial Sequence: Synthetic oligonucleotide
  Description of Combined DNA/RNA Molecule: Synthetic oligonucleotide
tatggactgtaccagcccaagcagccaagaggtccatcaaggat

SEQ ID NO: 4104 - DNA, 44 bp, Artificial Sequence
  Description of Artificial Sequence: Synthetic oligonucleotide
agggcagcagctcctgacaggacttgaaactgaggcggtgttca

SEQ ID NO: 4105 - DNA, 25 bp, Artificial Sequence
  Description of Artificial Sequence: Synthetic probe
tttccatcaagggcagcagctcctg

SEQ ID NO: 4106 - DNA, 20 bp, Artificial Sequence
  Description of Artificial Sequence: Synthetic primer
tatggactgtaccagcccaa

SEQ ID NO: 4107 - DNA, 21 bp, Artificial Sequence
  Description of Artificial Sequence: Synthetic primer
tgaacaccgcctcagtttcaa

SEQ ID NO: 4108 - DNA, 45 bp, Artificial Sequence
  Description of Artificial Sequence: Synthetic primer
  Description of Combined DNA/RNA Molecule: Synthetic primer
tgaacaccgcctcagtttcaatgggccaccaacccatcttgcaga

SEQ ID NO: 4109 - DNA, 39 bp, Artificial Sequence
  Description of Artificial Sequence: Synthetic primer
  Description of Combined DNA/RNA Molecule: Synthetic primer
acgacgacgacgaacccagctccaagggaccacagggcc

SEQ ID NO: 4110 - DNA, 39 bp, Artificial Sequence
  Description of Artificial Sequence: Synthetic primer
  Description of Combined DNA/RNA Molecule: Synthetic primer
acgacgacgacgaagctccaagggaccacagggcuctcc

SEQ ID NO: 4111 - DNA, 56 bp, Artificial Sequence
  Description of Artificial Sequence: Synthetic primer
  Description of Combined DNA/RNA Molecule: Synthetic primer
acgacgacgacttgacgaacataatcaactgatgtggaagggatgggtgacugagc

SEQ ID NO: 4112 - DNA, 46 bp, Artificial Sequence
  Description of Artificial Sequence: Synthetic oligonucleotide
  Description of Combined DNA/RNA Molecule: Synthetic oligonucleotide
tttgcctcttgtaggtgccaggaagcttgcaggcctccccaggctc

SEQ ID NO: 4113 - DNA, 48 bp, Artificial Sequence
  Description of Artificial Sequence: Synthetic oligonucleotide
ggcctcactgcagcccagctaggttaatctgggcaacgcggatattca

SEQ ID NO: 4114 - DNA, 22 bp, Artificial Sequence
  Description of Artificial Sequence: Synthetic probe
ttctccccaggcctcactgcag

SEQ ID NO: 4115 - DNA, 20 bp, Artificial Sequence
  Description of Artificial Sequence: Synthetic primer
tttgcctcttgtaggtgcca

SEQ ID NO: 4116 - DNA, 19 bp, Artificial Sequence
  Description of Artificial Sequence: Synthetic primer
tgaatatccgcgttgccca

SEQ ID NO: 4117 - DNA, 48 bp, Artificial Sequence
  Description of Artificial Sequence: Synthetic primer
  Description of Combined DNA/RNA Molecule: Synthetic primer
tgaatatccgcgttgcccatgtggaagggatgggtgactgaatggcta

SEQ ID NO: 4118 - DNA, 47 bp, Artificial Sequence
  Description of Artificial Sequence: Synthetic primer
  Description of Combined DNA/RNA Molecule: Synthetic primer
acgacgacgacgaatggtaaatatgatcacatgggccacacaaccag

SEQ ID NO: 4119 - DNA, 48 bp, Artificial Sequence
  Description of Artificial Sequence: Synthetic primer
  Description of Combined DNA/RNA Molecule: Synthetic primer
acgacgacgacgaaaaatatgatcacatgggccacacaaccaauggta

SEQ ID NO: 4120 - DNA, 51 bp, Artificial Sequence
  Description of Artificial Sequence: Synthetic primer
  Description of Combined DNA/RNA Molecule: Synthetic primer
acgacgacgacttgacgaacataatgaggtgtcctgcactcccacccaacg

SEQ ID NO: 4121 - DNA, 50 bp, Artificial Sequence
  Description of Artificial Sequence: Synthetic oligonucleotide
  Description of Combined DNA/RNA Molecule: Synthetic oligonucleotide
tgtcgcccggtagcaataaacgcaaactagtcagtggctcagacaccaat

SEQ ID NO: 4122 - DNA, 45 bp, Artificial Sequence
  Description of Artificial Sequence: Synthetic oligonucleotide
ccagcagggagctgctcagcagcgtttccgcgatctttgcattca

SEQ ID NO: 4123 - DNA, 24 bp, Artificial Sequence
  Description of Artificial Sequence: Synthetic probe
tttcagacaccagcagggagctgc

SEQ ID NO: 4124 - DNA, 21 bp, Artificial Sequence
  Description of Artificial Sequence: Synthetic primer
tgtcgcccggtagcaataaac

SEQ ID NO: 4125 - DNA, 22 bp, Artificial Sequence
  Description of Artificial Sequence: Synthetic primer
tgaatgcaaagatcgcggaaac

SEQ ID NO: 4126 - DNA, 53 bp, Artificial Sequence
  Description of Artificial Sequence: Synthetic primer
  Description of Combined DNA/RNA Molecule: Synthetic primer
tgaatgcaaagatcgcggaaaccacccaacattacactgtctgctgttgagcg

SEQ ID NO: 4127 - DNA, 39 bp, Artificial Sequence; identical to SEQ ID NO: 1516
  Description of Artificial Sequence: Synthetic primer
  Description of Combined DNA/RNA Molecule: Synthetic primer

SEQ ID NO: 4128 - DNA, 41 bp, Artificial Sequence; identical to SEQ ID NO: 1517
  Description of Artificial Sequence: Synthetic primer
  Description of Combined DNA/RNA Molecule: Synthetic primer

SEQ ID NO: 4129 - DNA, 49 bp, Artificial Sequence; identical to SEQ ID NO: 1518
  Description of Artificial Sequence: Synthetic primer
  Description of Combined DNA/RNA Molecule: Synthetic primer

SEQ ID NO: 4130 - DNA, 48 bp, Artificial Sequence; identical to SEQ ID NO: 1519
  Description of Artificial Sequence: Synthetic oligonucleotide
  Description of Combined DNA/RNA Molecule: Synthetic oligonucleotide

SEQ ID NO: 4131 - DNA, 39 bp, Artificial Sequence; identical to SEQ ID NO: 1520
  Description of Artificial Sequence: Synthetic oligonucleotide

SEQ ID NO: 4132 - DNA, 23 bp, Artificial Sequence
  Description of Artificial Sequence: Synthetic probe
ttaagtccaccaggcccagccac

SEQ ID NO: 4133 - DNA, 21 bp, Artificial Sequence
  Description of Artificial Sequence: Synthetic primer
tgaacgctcaaacacgtgaac

SEQ ID NO: 4134 - DNA, 20 bp, Artificial Sequence
  Description of Artificial Sequence: Synthetic primer
tggaacgcttacaggccaac

SEQ ID NO: 4135 - DNA, 43 bp, Artificial Sequence; identical to SEQ ID NO: 1524
  Description of Artificial Sequence: Synthetic primer
  Description of Combined DNA/RNA Molecule: Synthetic primer

SEQ ID NO: 4136 - DNA, 52 bp, Artificial Sequence
  Description of Artificial Sequence: Synthetic primer
  Description of Combined DNA/RNA Molecule: Synthetic primer
acgacgacgacgaaggtgaaataaatgttcttggaaattcctacccagacta

SEQ ID NO: 4137 - DNA, 53 bp, Artificial Sequence
  Description of Artificial Sequence: Synthetic primer
  Description of Combined DNA/RNA Molecule: Synthetic primer
acgacgacgacgaatgaaataaatgttcttggaaattcctacccagacuggcc

SEQ ID NO: 4138 - DNA, 50 bp, Artificial Sequence
  Description of Artificial Sequence: Synthetic primer
  Description of Combined DNA/RNA Molecule: Synthetic primer
acgacgacgacttgacgaacataatctgcccctttgccatgcagcagccc

SEQ ID NO: 4139 - DNA, 52 bp, Artificial Sequence
  Description of Artificial Sequence: Synthetic oligonucleotide
  Description of Combined DNA/RNA Molecule: Synthetic oligonucleotide
tgtgcactagtccacgtgaaacctagtccttgcagaagcagcattcaggctt

SEQ ID NO: 4140 - DNA, 53 bp, Artificial Sequence
  Description of Artificial Sequence: Synthetic oligonucleotide
ggccctcaggtaacatttgaagagctggcaggtttccgcgatctttgcattca

SEQ ID NO: 4141 - DNA, 33 bp, Artificial Sequence
  Description of Artificial Sequence: Synthetic probe
ttgcattcaggccctcaggtaacatttgaagag

SEQ ID NO: 4142 - DNA, 22 bp, Artificial Sequence
  Description of Artificial Sequence: Synthetic primer
tgtgcactagtccacgtgaaac

SEQ ID NO: 4143 - DNA, 22 bp, Artificial Sequence
  Description of Artificial Sequence: Synthetic primer
tgaatgcaaagatcgcggaaac

SEQ ID NO: 4144 - DNA, 47 bp, Artificial Sequence
  Description of Artificial Sequence: Synthetic primer
  Description of Combined DNA/RNA Molecule: Synthetic primer
tgaatgcaaagatcgcggaaacgccatgcagcagcctgaggtgctgt

SEQ ID NO: 4145 - DNA, 25 bp, Artificial Sequence
  Description of Artificial Sequence: Synthetic primer
  Description of Combined DNA/RNA Molecule: Synthetic primer
acgacgacgacttgacgaacataac

SEQ ID NO: 4146 - DNA, 41 bp, Artificial Sequence
  Description of Artificial Sequence: Synthetic primer
  Description of Combined DNA/RNA Molecule: Synthetic primer
acgacgacgacgaaagaaacacctcccccctccacaggaag

SEQ ID NO: 4147 - DNA, 39 bp, Artificial Sequence
  Description of Artificial Sequence: Synthetic primer
  Description of Combined DNA/RNA Molecule: Synthetic primer
acgacgacgacgaacctcccccctccacaggaaagtgga

SEQ ID NO: 4148 - DNA, 58 bp, Artificial Sequence
  Description of Artificial Sequence: Synthetic primer
  Description of Combined DNA/RNA Molecule: Synthetic primer
acgacgacgacttgacgaacataatctccaaggcctctctttggtttatctccacttt

SEQ ID NO: 4149 - DNA, 50 bp, Artificial Sequence
  Description of Artificial Sequence: Synthetic oligonucleotide
  Description of Combined DNA/RNA Molecule: Synthetic oligonucleotide
tacagatacggacgggaatcaaaaccagaggcagaaagcaacgcagctaa

SEQ ID NO: 4150 - DNA, 52 bp, Artificial Sequence
  Description of Artificial Sequence: Synthetic oligonucleotide
gctggaggacaactacatgctcccttaaccttgtttacatcctcctgcgtca

SEQ ID NO: 4151 - DNA, 28 bp, Artificial Sequence
  Description of Artificial Sequence: Synthetic probe
ttcaacgcagctggaggacaactacatg

SEQ ID NO: 4152 - DNA, 22 bp, Artificial Sequence
  Description of Artificial Sequence: Synthetic primer
tacagatacggacgggaatcaa

SEQ ID NO: 4153 - DNA, 22 bp, Artificial Sequence
  Description of Artificial Sequence: Synthetic primer
tgacgcaggaggatgtaaacaa

SEQ ID NO: 4154 - DNA, 56 bp, Artificial Sequence
  Description of Artificial Sequence: Synthetic primer
  Description of Combined DNA/RNA Molecule: Synthetic primer
tgacgcaggaggatgtaaacaatggtttatctccacttccttactgacaatgggag

SEQ ID NO: 4155 - DNA, 39 bp, Artificial Sequence
  Description of Artificial Sequence: Synthetic primer
  Description of Combined DNA/RNA Molecule: Synthetic primer
acgacgacgacgaagaggctgactgcagggaccagctaa

SEQ ID NO: 4156 - DNA, 40 bp, Artificial Sequence
  Description of Artificial Sequence: Synthetic primer
  Description of Combined DNA/RNA Molecule: Synthetic primer
acgacgacgacgaactgcagggaccagctagggtcucacg

SEQ ID NO: 4157 - DNA, 60 bp, Artificial Sequence
  Description of Artificial Sequence: Synthetic primer
  Description of Combined DNA/RNA Molecule: Synthetic primer
acgacgacgacttgacgaacataatgttcagggagatgtaatccttgctgttgtaugtgc

SEQ ID NO: 4158 - DNA, 46 bp, Artificial Sequence
  Description of Artificial Sequence: Synthetic oligonucleotide
  Description of Combined DNA/RNA Molecule: Synthetic oligonucleotide
ttggcgcaacggtttccaagcaacatgaggcccaacaggcaccttt

SEQ ID NO: 4159 - DNA, 50 bp, Artificial Sequence
  Description of Artificial Sequence: Synthetic oligonucleotide
cctcctccacaggtatcaccagcacacattgtttacatcctcctgcgtca

SEQ ID NO: 4160 - DNA, 28 bp, Artificial Sequence
  Description of Artificial Sequence: Synthetic probe
ttacaggcacctcctccacaggtatcac

SEQ ID NO: 4161 - DNA, 19 bp, Artificial Sequence
  Description of Artificial Sequence: Synthetic primer
ttggcgcaacggtttccaa

SEQ ID NO: 4162 - DNA, 22 bp, Artificial Sequence
  Description of Artificial Sequence: Synthetic primer
tgacgcaggaggatgtaaacaa

SEQ ID NO: 4163 - DNA, 57 bp, Artificial Sequence
  Description of Artificial Sequence: Synthetic primer
  Description of Combined DNA/RNA Molecule: Synthetic primer
tgacgcaggaggatgtaaacaacagggagatgtaatccttgctgttgtatatgtgcc

SEQ ID NO: 4164 - DNA, 41 bp, Artificial Sequence
  Description of Artificial Sequence: Synthetic primer
  Description of Combined DNA/RNA Molecule: Synthetic primer
acgacgacgacgaacagtgtcctcaggtgcatggcagcagt

SEQ ID NO: 4165 - DNA, 43 bp, Artificial Sequence
  Description of Artificial Sequence: Synthetic primer
  Description of Combined DNA/RNA Molecule: Synthetic primer
acgacgacgacgaattcctcagtgtcctcaggtgcatggcagt

SEQ ID NO: 4166 - DNA, 59 bp, Artificial Sequence
  Description of Artificial Sequence: Synthetic primer
  Description of Combined DNA/RNA Molecule: Synthetic primer
acgacgacgacttgacgaacataatgctgtgaagttttcaagtcttggtgggtagccta

SEQ ID NO: 4167 - DNA, 56 bp, Artificial Sequence
  Description of Artificial Sequence: Synthetic oligonucleotide
  Description of Combined DNA/RNA Molecule: Synthetic oligonucleotide
ttcagcagcctggcatcaccagcagtgagaatgagttcttcaagatcatcaggaag

SEQ ID NO: 4168 - DNA, 55 bp, Artificial Sequence
  Description of Artificial Sequence: Synthetic oligonucleotide
ggagaccacacaataacaacaaagttacttgccagggtggagcgctaaggttgca

SEQ ID NO: 4169 - DNA, 37 bp, Artificial Sequence
  Description of Artificial Sequence: Synthetic probe
ttatcatcaggagaccacacaataacaacaaagttac

SEQ ID NO: 4170 - DNA, 19 bp, Artificial Sequence
  Description of Artificial Sequence: Synthetic primer
ttcagcagcctggcatcac

SEQ ID NO: 4171 - DNA, 19 bp, Artificial Sequence
  Description of Artificial Sequence: Synthetic primer
tgcaaccttagcgctccac

SEQ ID NO: 4172 - DNA, 52 bp, Artificial Sequence
  Description of Artificial Sequence: Synthetic primer
  Description of Combined DNA/RNA Molecule: Synthetic primer
tgcaaccttagcgctccacgaagttttcaagtcttggtgggtagcttggcag

SEQ ID NO: 4173 - DNA, 45 bp, Artificial Sequence
  Description of Artificial Sequence: Synthetic primer
  Description of Combined DNA/RNA Molecule: Synthetic primer
acgacgacgacgaagggatgagaagtcacagaggagctcactgaa

SEQ ID NO: 4174 - DNA, 46 bp, Artificial Sequence
  Description of Artificial Sequence: Synthetic primer
  Description of Combined DNA/RNA Molecule: Synthetic primer
acgacgacgacgaaatgagaagtcacagaggagctcactgagggta

SEQ ID NO: 4175 - DNA, 48 bp, Artificial Sequence
  Description of Artificial Sequence: Synthetic primer
  Description of Combined DNA/RNA Molecule: Synthetic primer
acgacgacgacttgacgaacataattggtgaggtgatggaggcugcag

SEQ ID NO: 4176 - DNA, 42 bp, Artificial Sequence
  Description of Artificial Sequence: Synthetic oligonucleotide
  Description of Combined DNA/RNA Molecule: Synthetic oligonucleotide
ttgttcgcccgttggtcacggacacccaccctggacactctc

SEQ ID NO: 4177 - DNA, 49 bp, Artificial Sequence
  Description of Artificial Sequence: Synthetic oligonucleotide
ctcctccatgctggaaacagcaggttgcaggtggagcgctaaggttgca

SEQ ID NO: 4178 - DNA, 29 bp, Artificial Sequence
  Description of Artificial Sequence: Synthetic probe
ttctggacactcctccatgctggaaacag

SEQ ID NO: 4179 - DNA, 19 bp, Artificial Sequence
  Description of Artificial Sequence: Synthetic primer
ttgttcgcccgttggtcac

SEQ ID NO: 4180 - DNA, 19 bp, Artificial Sequence
  Description of Artificial Sequence: Synthetic primer
tgcaaccttagcgctccac

SEQ ID NO: 4181 - DNA, 42 bp, Artificial Sequence
  Description of Artificial Sequence: Synthetic primer
  Description of Combined DNA/RNA Molecule: Synthetic primer
tgcaaccttagcgctccacggtgaggtgatggaggttgcaat

SEQ ID NO: 4182 - DNA, 40 bp, Artificial Sequence
  Description of Artificial Sequence: Synthetic primer
  Description of Combined DNA/RNA Molecule: Synthetic primer
acgacgacgacgaacagggtggagtcaaggaggcagggcc

SEQ ID NO: 4183 - DNA, 40 bp, Artificial Sequence
  Description of Artificial Sequence: Synthetic primer
  Description of Combined DNA/RNA Molecule: Synthetic primer
acgacgacgacgaagtggagtcaaggaggcagggcugcaa

SEQ ID NO: 4184 - DNA, 52 bp, Artificial Sequence
  Description of Artificial Sequence: Synthetic primer
  Description of Combined DNA/RNA Molecule: Synthetic primer
acgacgacgacttgacgaacataatccccatggcaaaaagcctggacuaaga

SEQ ID NO: 4185 - DNA, 52 bp, Artificial Sequence
  Description of Artificial Sequence: Synthetic oligonucleotide
  Description of Combined DNA/RNA Molecule: Synthetic oligonucleotide
tatcgcatcaaatggagagcaagcaggcctccttatctctagagtcagcctc

SEQ ID NO: 4186 - DNA, 44 bp, Artificial Sequence
  Description of Artificial Sequence: Synthetic oligonucleotide
gccctggctctctggcacagggttgaccgctgttatacgttgca

SEQ ID NO: 4187 - DNA, 24 bp, Artificial Sequence
  Description of Artificial Sequence: Synthetic probe
aaagagtcagccctggctctctgg

SEQ ID NO: 4188 - DNA, 22 bp, Artificial Sequence
  Description of Artificial Sequence: Synthetic primer
tatcgcatcaaatggagagcaa

SEQ ID NO: 4189 - DNA, 22 bp, Artificial Sequence
  Description of Artificial Sequence: Synthetic primer
tgcaacgtataacagcggtcaa

SEQ ID NO: 4190 - DNA, 47 bp, Artificial Sequence
  Description of Artificial Sequence: Synthetic primer
  Description of Combined DNA/RNA Molecule: Synthetic primer
tgcaacgtataacagcggtcaacctggactaagaggccctatgccaa

SEQ ID NO: 4191 - DNA, 39 bp, Artificial Sequence
  Description of Artificial Sequence: Synthetic primer
  Description of Combined DNA/RNA Molecule: Synthetic primer
acgacgacgacgaaccaggacatccccagtgccautagt

SEQ ID NO: 4192 - DNA, 42 bp, Artificial Sequence
  Description of Artificial Sequence: Synthetic primer
  Description of Combined DNA/RNA Molecule: Synthetic primer
acgacgacgacgaaccaggacatccccagtgccattagcagt

SEQ ID NO: 4193 - DNA, 51 bp, Artificial Sequence
  Description of Artificial Sequence: Synthetic primer
  Description of Combined DNA/RNA Molecule: Synthetic primer
acgacgacgacttgacgaacataatgtgtggtgagtgcagtctgcccccct

SEQ ID NO: 4194 - DNA, 46 bp, Artificial Sequence
  Description of Artificial Sequence: Synthetic oligonucleotide
  Description of Combined DNA/RNA Molecule: Synthetic oligonucleotide
tcctagtacctacagtgggcaagcagctttcagagggctcagagtg

SEQ ID NO: 4195 - DNA, 47 bp, Artificial Sequence
  Description of Artificial Sequence: Synthetic oligonucleotide
gagcacctcagggagggatgggaccttgaccgctgttatacgttgca

SEQ ID NO: 4196 - DNA, 25 bp, Artificial Sequence
  Description of Artificial Sequence: Synthetic probe
ttgggctcagagcacctcagggagg

SEQ ID NO: 4197 - DNA, 22 bp, Artificial Sequence
  Description of Artificial Sequence: Synthetic primer
tcctagtacctacagtgggcaa

SEQ ID NO: 4198 - DNA, 22 bp, Artificial Sequence
  Description of Artificial Sequence: Synthetic primer
tgcaacgtataacagcggtcaa

SEQ ID NO: 4199 - DNA, 44 bp, Artificial Sequence
  Description of Artificial Sequence: Synthetic primer
  Description of Combined DNA/RNA Molecule: Synthetic primer
tgcaacgtataacagcggtcaacccccctccctgcccttgggac

SEQ ID NO: 4200 - DNA, 38 bp, Artificial Sequence
  Description of Artificial Sequence: Synthetic primer
  Description of Combined DNA/RNA Molecule: Synthetic primer
acgacgacgacgaaccccaaggcacaggacccagcccc

SEQ ID NO: 4201 - DNA, 40 bp, Artificial Sequence
  Description of Artificial Sequence: Synthetic primer
  Description of Combined DNA/RNA Molecule: Synthetic primer
acgacgacgacgaagacaccaacccccaaggcacaggact

SEQ ID NO: 4202 - DNA, 52 bp, Artificial Sequence
  Description of Artificial Sequence: Synthetic primer
  Description of Combined DNA/RNA Molecule: Synthetic primer
acgacgacgacttgacgaacataatggaggtgcctgaccctgtggtataaag

SEQ ID NO: 4203 - DNA, 47 bp, Artificial Sequence
  Description of Artificial Sequence: Synthetic oligonucleotide
  Description of Combined DNA/RNA Molecule: Synthetic oligonucleotide
tagtttgtcgaaagtcccacacccctgctgctgcactcatcacaggt

SEQ ID NO: 4204 - DNA, 47 bp, Artificial Sequence
  Description of Artificial Sequence: Synthetic oligonucleotide
cagactcccactagggcctctgcagggtgcaaaattcaggctgtgca

SEQ ID NO: 4205 - DNA, 29 bp, Artificial Sequence
  Description of Artificial Sequence: Synthetic probe
ttctcatcacagactcccactagggcctc

SEQ ID NO: 4206 - DNA, 22 bp, Artificial Sequence
  Description of Artificial Sequence: Synthetic primer
tagtttgtcgaaagtcccacac

SEQ ID NO: 4207 - DNA, 21 bp, Artificial Sequence
  Description of Artificial Sequence: Synthetic primer
tgcacagcctgaattttgcac

SEQ ID NO: 4208 - DNA, 53 bp, Artificial Sequence
  Description of Artificial Sequence: Synthetic primer
  Description of Combined DNA/RNA Molecule: Synthetic primer
tgcacagcctgaattttgcacaggtgcctgaccctgtggtataaaaatggtgt

SEQ ID NO: 4209 - DNA, 41 bp, Artificial Sequence
  Description of Artificial Sequence: Synthetic primer
  Description of Combined DNA/RNA Molecule: Synthetic primer
acgacgacgacgaacagaggaagaggaggtttggcactggg

SEQ ID NO: 4210 - DNA, 38 bp, Artificial Sequence
  Description of Artificial Sequence: Synthetic primer
  Description of Combined DNA/RNA Molecule: Synthetic primer
acgacgacgacgaaccaggcaccaccagaggaagggag

SEQ ID NO: 4211 - DNA, 51 bp, Artificial Sequence
  Description of Artificial Sequence: Synthetic primer
  Description of Combined DNA/RNA Molecule: Synthetic primer
acgacgacgacttgacgaacataatccagtgaggcctgacagtgcccccaa

SEQ ID NO: 4212 - DNA, 44 bp, Artificial Sequence
  Description of Artificial Sequence: Synthetic oligonucleotide
  Description of Combined DNA/RNA Molecule: Synthetic oligonucleotide
tagacacgagcgaggtcacgcagaccaagctctggctcagccgg

SEQ ID NO: 4213 - DNA, 43 bp, Artificial Sequence
  Description of Artificial Sequence: Synthetic oligonucleotide
gccaactggacacccagggctggtgcaaaattcaggctgtgca

SEQ ID NO: 4214 - DNA, 23 bp, Artificial Sequence
  Description of Artificial Sequence: Synthetic probe
aatggctcagccaactggacacc

SEQ ID NO: 4215 - DNA, 19 bp, Artificial Sequence
  Description of Artificial Sequence: Synthetic primer
tagacacgagcgaggtcac

SEQ ID NO: 4216 - DNA, 21 bp, Artificial Sequence
  Description of Artificial Sequence: Synthetic primer
tgcacagcctgaattttgcac

SEQ ID NO: 4217 - DNA, 43 bp, Artificial Sequence
  Description of Artificial Sequence: Synthetic primer
  Description of Combined DNA/RNA Molecule: Synthetic primer
tgcacagcctgaattttgcacacagtgcccccagccttgggta

SEQ ID NO: 4218 - DNA, 35 bp, Artificial Sequence
  Description of Artificial Sequence: Synthetic primer
  Description of Combined DNA/RNA Molecule: Synthetic primer
acgacgacgacgaagaggcagaggcaggcaggcta

SEQ ID NO: 4219 - DNA, 35 bp, Artificial Sequence
  Description of Artificial Sequence: Synthetic primer
  Description of Combined DNA/RNA Molecule: Synthetic primer
acgacgacgacgaagcagaggcaggcaggcugcat

SEQ ID NO: 4220 - DNA, 49 bp, Artificial Sequence
  Description of Artificial Sequence: Synthetic primer
  Description of Combined DNA/RNA Molecule: Synthetic primer
acgacgacgacttgacgaacataatccagcccctctcctgccacctggt

SEQ ID NO: 4221 - DNA, 46 bp, Artificial Sequence
  Description of Artificial Sequence: Synthetic oligonucleotide
  Description of Combined DNA/RNA Molecule: Synthetic oligonucleotide
ttcttcacagtaccgccacaagagaggtcagatgtgggacaagtca

SEQ ID NO: 4222 - DNA, 49 bp, Artificial Sequence
  Description of Artificial Sequence: Synthetic oligonucleotide
agttgggcagaggaagaggaaccacagatgtgtgttgtctggtggtgca

SEQ ID NO: 4223 - DNA, 29 bp, Artificial Sequence
  Description of Artificial Sequence: Synthetic probe
aatgggacaagttgggcagaggaagagga

SEQ ID NO: 4224 - DNA, 20 bp, Artificial Sequence
  Description of Artificial Sequence: Synthetic primer
ttcttcacagtaccgccaca

SEQ ID NO: 4225 - DNA, 19 bp, Artificial Sequence
  Description of Artificial Sequence: Synthetic primer
tgcaccaccagacaacaca

SEQ ID NO: 4226 - DNA, 44 bp, Artificial Sequence
  Description of Artificial Sequence: Synthetic primer
  Description of Combined DNA/RNA Molecule: Synthetic primer
tgcaccaccagacaacacactcctgccacctggcatctatggtt

SEQ ID NO: 4227 - DNA, 40 bp, Artificial Sequence
  Description of Artificial Sequence: Synthetic primer
  Description of Combined DNA/RNA Molecule: Synthetic primer
acgacgacgacgaaccctggtcccctgagtctccaggtct

SEQ ID NO: 4228 - DNA, 40 bp, Artificial Sequence
  Description of Artificial Sequence: Synthetic primer
  Description of Combined DNA/RNA Molecule: Synthetic primer
acgacgacgacgaactcacagacagccctggtcccctgaa

SEQ ID NO: 4229 - DNA, 57 bp, Artificial Sequence
  Description of Artificial Sequence: Synthetic primer
  Description of Combined DNA/RNA Molecule: Synthetic primer
acgacgacgacttgacgaacataatctgaagatgaaaccaggtaaaggtgccuggga

SEQ ID NO: 4230 - DNA, 48 bp, Artificial Sequence
  Description of Artificial Sequence: Synthetic oligonucleotide
  Description of Combined DNA/RNA Molecule: Synthetic oligonucleotide
taccctcctagctccgtacaccaagatcaaccccaaggctacaggatt

SEQ ID NO: 4231 - DNA, 48 bp, Artificial Sequence
  Description of Artificial Sequence: Synthetic oligonucleotide
ggacctgcagagatcctcaacccaggagatgtgttgtctggtggtgca

SEQ ID NO: 4232 - DNA, 30 bp, Artificial Sequence
  Description of Artificial Sequence: Synthetic probe
ttggctacaggacctgcagagatcctcaac

SEQ ID NO: 4233 - DNA, 20 bp, Artificial Sequence
  Description of Artificial Sequence: Synthetic primer
taccctcctagctccgtaca

SEQ ID NO: 4234 - DNA, 19 bp, Artificial Sequence
  Description of Artificial Sequence: Synthetic primer
tgcaccaccagacaacaca

SEQ ID NO: 4235 - DNA, 42 bp, Artificial Sequence
  Description of Artificial Sequence: Synthetic primer
  Description of Combined DNA/RNA Molecule: Synthetic primer
tgcaccaccagacaacacaggtgcctgaggctctcttgggtc

SEQ ID NO: 4236 - DNA, 41 bp, Artificial Sequence
  Description of Artificial Sequence: Synthetic primer
  Description of Combined DNA/RNA Molecule: Synthetic primer
acgacgacgacgaagttttctgaggtcagggccacagtgaa

SEQ ID NO: 4237 - DNA, 38 bp, Artificial Sequence
  Description of Artificial Sequence: Synthetic primer
  Description of Combined DNA/RNA Molecule: Synthetic primer
acgacgacgacgaagaggtcagagccacagtgagcact

SEQ ID NO: 4238 - DNA, 51 bp, Artificial Sequence
  Description of Artificial Sequence: Synthetic primer
  Description of Combined DNA/RNA Molecule: Synthetic primer
acgacgacgacttgacgaacataatgggtgtggctggaccctgagautgtc

SEQ ID NO: 4239 - DNA, 46 bp, Artificial Sequence
  Description of Artificial Sequence: Synthetic oligonucleotide
  Description of Combined DNA/RNA Molecule: Synthetic oligonucleotide
tcatcgccctcagatcttccacaccaggagcagccagcaccaccct

SEQ ID NO: 4240 - DNA, 45 bp, Artificial Sequence
  Description of Artificial Sequence: Synthetic oligonucleotide
cctctggcacatccaggcccatcctggaggatagattggagggca

SEQ ID NO: 4241 - DNA, 25 bp, Artificial Sequence
  Description of Artificial Sequence: Synthetic probe
ttagcaccacctctggcacatccag

SEQ ID NO: 4242 - DNA, 21 bp, Artificial Sequence
  Description of Artificial Sequence: Synthetic primer
tcatcgccctcagatcttcca

SEQ ID NO: 4243 - DNA, 21 bp, Artificial Sequence
  Description of Artificial Sequence: Synthetic primer
tgccctccaatctatcctcca

SEQ ID NO: 4244 - DNA, 48 bp, Artificial Sequence
  Description of Artificial Sequence: Synthetic primer
  Description of Combined DNA/RNA Molecule: Synthetic primer
tgccctccaatctatcctccaggtgtggctggaccctgagactgttga

SEQ ID NO: 4245 - DNA, 36 bp, Artificial Sequence
  Description of Artificial Sequence: Synthetic primer
  Description of Combined DNA/RNA Molecule: Synthetic primer
acgacgacgacgaagcccagaaggccaggcagggct

SEQ ID NO: 4246 - DNA, 39 bp, Artificial Sequence
  Description of Artificial Sequence: Synthetic primer
  Description of Combined DNA/RNA Molecule: Synthetic primer
acgacgacgacgaacaggtgggtccaggcccagaaggct

SEQ ID NO: 4247 - DNA, 47 bp, Artificial Sequence
  Description of Artificial Sequence: Synthetic primer
  Description of Combined DNA/RNA Molecule: Synthetic primer
acgacgacgacttgacgaacataatgcccagcctgcccttgcuggag

SEQ ID NO: 4248 - DNA, 42 bp, Artificial Sequence
  Description of Artificial Sequence: Synthetic oligonucleotide
  Description of Combined DNA/RNA Molecule: Synthetic oligonucleotide
taaccagttaccaccgccacctgtcagggcctggacagggtc

SEQ ID NO: 4249 - DNA, 40 bp, Artificial Sequence
  Description of Artificial Sequence: Synthetic oligonucleotide
gggctggcagagggaccagtggaggatagattggagggca

SEQ ID NO: 4250 - DNA, 23 bp, Artificial Sequence
  Description of Artificial Sequence: Synthetic probe
ttctggacagggctggcagaggg

SEQ ID NO: 4251 - DNA, 19 bp, Artificial Sequence
  Description of Artificial Sequence: Synthetic primer
taaccagttaccaccgcca

SEQ ID NO: 4252 - DNA, 21 bp, Artificial Sequence
  Description of Artificial Sequence: Synthetic primer
tgccctccaatctatcctcca

SEQ ID NO: 4253 - DNA, 45 bp, Artificial Sequence
  Description of Artificial Sequence: Synthetic primer
  Description of Combined DNA/RNA Molecule: Synthetic primer
tgccctccaatctatcctccattgctggaagaggtggcttggcct

SEQ ID NO: 4254 - DNA, 41 bp, Artificial Sequence
  Description of Artificial Sequence: Synthetic primer
  Description of Combined DNA/RNA Molecule: Synthetic primer
acgacgacgacgaagacagaagggtgacagcacccagtggt

SEQ ID NO: 4255 - DNA, 52 bp, Artificial Sequence
  Description of Artificial Sequence: Synthetic primer
  Description of Combined DNA/RNA Molecule: Synthetic primer
acgacgacgacttgacgaacataatcctgggcctttgtgctttgtgcuctgc

SEQ ID NO: 4256 - DNA, 45 bp, Artificial Sequence
  Description of Artificial Sequence: Synthetic oligonucleotide
  Description of Combined DNA/RNA Molecule: Synthetic oligonucleotide
tcgcaccggaattctgaccgtggcaccaagggatctgacagggat

SEQ ID NO: 4257 - DNA, 40 bp, Artificial Sequence
  Description of Artificial Sequence: Synthetic oligonucleotide
ggagccaggccagagggaggggtagtttcccatgacggca

SEQ ID NO: 4258 - DNA, 22 bp, Artificial Sequence
  Description of Artificial Sequence: Synthetic probe
tttctgacaggagccaggccag

SEQ ID NO: 4259 - DNA, 19 bp, Artificial Sequence
  Description of Artificial Sequence: Synthetic primer
tcgcaccggaattctgacc

SEQ ID NO: 4260 - DNA, 20 bp, Artificial Sequence
  Description of Artificial Sequence: Synthetic primer
tgccgtcatgggaaactacc

SEQ ID NO: 4261 - DNA, 46 bp, Artificial Sequence
  Description of Artificial Sequence: Synthetic primer
  Description of Combined DNA/RNA Molecule: Synthetic primer
tgccgtcatgggaaactaccggcctttgtgctttgtgctttgtggt

SEQ ID NO: 4262 - DNA, 38 bp, Artificial Sequence
  Description of Artificial Sequence: Synthetic primer
  Description of Combined DNA/RNA Molecule: Synthetic primer
acgacgacgacgaagagcctggcaggcagcacaagctt

SEQ ID NO: 4263 - DNA, 37 bp, Artificial Sequence
  Description of Artificial Sequence: Synthetic primer
  Description of Combined DNA/RNA Molecule: Synthetic primer
acgacgacgacgaagcctggcaggcagcacaagctct

SEQ ID NO: 4264 - DNA, 53 bp, Artificial Sequence
  Description of Artificial Sequence: Synthetic primer
  Description of Combined DNA/RNA Molecule: Synthetic primer
acgacgacgacttgacgaacataatggcactaggttctctgggtgggacgtgt

SEQ ID NO: 4265 - DNA, 45 bp, Artificial Sequence
  Description of Artificial Sequence: Synthetic oligonucleotide
  Description of Combined DNA/RNA Molecule: Synthetic oligonucleotide
ttgcacgttgtcctgcaccgctcccctggagttccagtcactctg

SEQ ID NO: 4266 - DNA, 44 bp, Artificial Sequence
  Description of Artificial Sequence: Synthetic oligonucleotide
ctccacccagtggctctgtgcagcggtagtttcccatgacggca

SEQ ID NO: 4267 - DNA, 26 bp, Artificial Sequence
  Description of Artificial Sequence: Synthetic probe
aaccagtcactccacccagtggctct

SEQ ID NO: 4268 - DNA, 19 bp, Artificial Sequence
  Description of Artificial Sequence: Synthetic primer
ttgcacgttgtcctgcacc

SEQ ID NO: 4269 - DNA, 20 bp, Artificial Sequence
  Description of Artificial Sequence: Synthetic primer
tgccgtcatgggaaactacc

SEQ ID NO: 4270 - DNA, 50 bp, Artificial Sequence
  Description of Artificial Sequence: Synthetic primer
  Description of Combined DNA/RNA Molecule: Synthetic primer
tgccgtcatgggaaactaccgcactaggttctctgggtgggaaatgctgt

SEQ ID NO: 4271 - DNA, 39 bp, Artificial Sequence
  Description of Artificial Sequence: Synthetic primer
  Description of Combined DNA/RNA Molecule: Synthetic primer
acgacgacgacgaaccacactgcccacccacacacagtt

SEQ ID NO: 4272 - DNA, 38 bp, Artificial Sequence
  Description of Artificial Sequence: Synthetic primer
  Description of Combined DNA/RNA Molecule: Synthetic primer
acgacgacgacgaagcttcccacactgcccacccacat

SEQ ID NO: 4273 - DNA, 54 bp, Artificial Sequence
  Description of Artificial Sequence: Synthetic primer
  Description of Combined DNA/RNA Molecule: Synthetic primer
acgacgacgacttgacgaacataatccaggaaggaggatggtggaggaagtaga

SEQ ID NO: 4274 - DNA, 49 bp, Artificial Sequence
  Description of Artificial Sequence: Synthetic oligonucleotide
  Description of Combined DNA/RNA Molecule: Synthetic oligonucleotide
tgcttacccacgatgcaccctcaggccacctttttacacccccagacat

SEQ ID NO: 4275 - DNA, 48 bp, Artificial Sequence
  Description of Artificial Sequence: Synthetic oligonucleotide
gacaccaatcaccaacccacatccctgcggtcgtatgacttgctcgca

SEQ ID NO: 4276 - DNA, 26 bp, Artificial Sequence
  Description of Artificial Sequence: Synthetic probe
ttacccccagacaccaatcaccaacc

SEQ ID NO: 4277 - DNA, 19 bp, Artificial Sequence
  Description of Artificial Sequence: Synthetic primer
tgcttacccacgatgcacc

SEQ ID NO: 4278 - DNA, 20 bp, Artificial Sequence
  Description of Artificial Sequence: Synthetic primer
tgcgagcaagtcatacgacc

SEQ ID NO: 4279 - DNA, 43 bp, Artificial Sequence
  Description of Artificial Sequence: Synthetic primer
  Description of Combined DNA/RNA Molecule: Synthetic primer
tgcgagcaagtcatacgaccacccacagccaggacctcgcaga

SEQ ID NO: 4280 - DNA, 35 bp, Artificial Sequence
  Description of Artificial Sequence: Synthetic primer
  Description of Combined DNA/RNA Molecule: Synthetic primer
acgacgacgacgaaccaggcctggcaggcaagcat

SEQ ID NO: 4281 - DNA, 35 bp, Artificial Sequence
  Description of Artificial Sequence: Synthetic primer
  Description of Combined DNA/RNA Molecule: Synthetic primer
acgacgacgacgaagcccaggcctggcaggcaagt

SEQ ID NO: 4282 - DNA, 56 bp, Artificial Sequence
  Description of Artificial Sequence: Synthetic primer
  Description of Combined DNA/RNA Molecule: Synthetic primer
acgacgacgacttgacgaacataattctgtttcttgtttgtggtctggagtugcct

SEQ ID NO: 4283 - DNA, 51 bp, Artificial Sequence
  Description of Artificial Sequence: Synthetic oligonucleotide
  Description of Combined DNA/RNA Molecule: Synthetic oligonucleotide
tagccgatggcgtaaaaccgcaccattcccacataaatcaccaacaccaag

SEQ ID NO: 4284 - DNA, 56 bp, Artificial Sequence
  Description of Artificial Sequence: Synthetic oligonucleotide
ccagagtctcaggaaaaggcacatttttcattgctgggtcgtatgacttgctcgca

SEQ ID NO: 4285 - DNA, 31 bp, Artificial Sequence
  Description of Artificial Sequence: Synthetic probe
aaaccaacaccagagtctcaggaaaaggcac

SEQ ID NO: 4286 - DNA, 19 bp, Artificial Sequence
  Description of Artificial Sequence: Synthetic primer
tagccgatggcgtaaaacc

SEQ ID NO: 4287 - DNA, 20 bp, Artificial Sequence
  Description of Artificial Sequence: Synthetic primer
tgcgagcaagtcatacgacc

SEQ ID NO: 4288 - DNA, 52 bp, Artificial Sequence
  Description of Artificial Sequence: Synthetic primer
  Description of Combined DNA/RNA Molecule: Synthetic primer
tgcgagcaagtcatacgacctctgtttcttgtttgtggtctggagctgcccc

SEQ ID NO: 4289 - DNA, 39 bp, Artificial Sequence
  Description of Artificial Sequence: Synthetic primer
  Description of Combined DNA/RNA Molecule: Synthetic primer
acgacgacgacgaaggcagaggtcaaggaagccaagcct

SEQ ID NO: 4290 - DNA, 38 bp, Artificial Sequence
  Description of Artificial Sequence: Synthetic primer
  Description of Combined DNA/RNA Molecule: Synthetic primer
acgacgacgacgaaggaggcagaggtcaaggaagccag

SEQ ID NO: 4291 - DNA, 50 bp, Artificial Sequence
  Description of Artificial Sequence: Synthetic primer
  Description of Combined DNA/RNA Molecule: Synthetic primer
acgacgacgacttgacgaacataatctgagcctggctgtgtgcacagctc

SEQ ID NO: 4292 - DNA, 42 bp, Artificial Sequence
  Description of Artificial Sequence: Synthetic oligonucleotide
  Description of Combined DNA/RNA Molecule: Synthetic oligonucleotide
ttacaggccgcatagcaacgccccaaggctcccaacaccatt

SEQ ID NO: 4293 - DNA, 44 bp, Artificial Sequence
  Description of Artificial Sequence: Synthetic oligonucleotide
ccaccccaggaggaatcttgcaggcgttgagacatgggctcgca

SEQ ID NO: 4294 - DNA, 26 bp, Artificial Sequence
  Description of Artificial Sequence: Synthetic probe
aacccaacaccaccccaggaggaatc

SEQ ID NO: 4295 - DNA, 19 bp, Artificial Sequence
  Description of Artificial Sequence: Synthetic primer
ttacaggccgcatagcaac

SEQ ID NO: 4296 - DNA, 19 bp, Artificial Sequence
  Description of Artificial Sequence: Synthetic primer
tgcgagcccatgtctcaac

SEQ ID NO: 4297 - DNA, 47 bp, Artificial Sequence
  Description of Artificial Sequence: Synthetic primer
  Description of Combined DNA/RNA Molecule: Synthetic primer
tgcgagcccatgtctcaacgtgtgcacagcttctagtggcttgcaaa

SEQ ID NO: 4298 - DNA, 39 bp, Artificial Sequence
  Description of Artificial Sequence: Synthetic primer
  Description of Combined DNA/RNA Molecule: Synthetic primer
acgacgacgacgaaagtgaggtgcaactgagccagatgc

SEQ ID NO: 4299 - DNA, 40 bp, Artificial Sequence
  Description of Artificial Sequence: Synthetic primer
  Description of Combined DNA/RNA Molecule: Synthetic primer
acgacgacgacgaagtgaggtgcaactgagccagaugtgt

SEQ ID NO: 4300 - DNA, 50 bp, Artificial Sequence
  Description of Artificial Sequence: Synthetic primer
  Description of Combined DNA/RNA Molecule: Synthetic primer
acgacgacgacttgacgaacataatgctctctgctcacctgaggccctgc

SEQ ID NO: 4301 - DNA, 42 bp, Artificial Sequence
  Description of Artificial Sequence: Synthetic oligonucleotide
  Description of Combined DNA/RNA Molecule: Synthetic oligonucleotide
ttcgcctaccgcagtgaactgagctgcccagggcgcagggtg

SEQ ID NO: 4302 - DNA, 47 bp, Artificial Sequence
  Description of Artificial Sequence: Synthetic oligonucleotide
gggcagttgggatagagaaaggctttcagttgagacatgggctcgca

SEQ ID NO: 4303 - DNA, 20 bp, Artificial Sequence
  Description of Artificial Sequence: Synthetic probe
ttgggcgcagggcagttggg

SEQ ID NO: 4304 - DNA, 19 bp, Artificial Sequence
  Description of Artificial Sequence: Synthetic primer
ttcgcctaccgcagtgaac

SEQ ID NO: 4305 - DNA, 19 bp, Artificial Sequence
  Description of Artificial Sequence: Synthetic primer
tgcgagcccatgtctcaac

SEQ ID NO: 4306 - DNA, 42 bp, Artificial Sequence
  Description of Artificial Sequence: Synthetic primer
  Description of Combined DNA/RNA Molecule: Synthetic primer
tgcgagcccatgtctcaacctgctcacctgaggccttgtccc

SEQ ID NO: 4307 - DNA, 40 bp, Artificial Sequence
  Description of Artificial Sequence: Synthetic primer
  Description of Combined DNA/RNA Molecule: Synthetic primer
acgacgacgacgaaacacagcaccctgaggatgcagtgga

SEQ ID NO: 4308 - DNA, 41 bp, Artificial Sequence
  Description of Artificial Sequence: Synthetic primer
  Description of Combined DNA/RNA Molecule: Synthetic primer
acgacgacgacgaaacagcaccctgaggatgcagtgggtga

SEQ ID NO: 4309 - DNA, 53 bp, Artificial Sequence
  Description of Artificial Sequence: Synthetic primer
  Description of Combined DNA/RNA Molecule: Synthetic primer
acgacgacgacttgacgaacataatcctgcctgtttctgaggctgtccugagt

SEQ ID NO: 4310 - DNA, 43 bp, Artificial Sequence
  Description of Artificial Sequence: Synthetic oligonucleotide
  Description of Combined DNA/RNA Molecule: Synthetic oligonucleotide
ttcgcctaccgcagtgaaccaggagggcagtgtggacagggtt

SEQ ID NO: 4311 - DNA, 46 bp, Artificial Sequence
  Description of Artificial Sequence: Synthetic oligonucleotide
gggccacagtggacttgaccctctgacgttgagacatgggctcgca

SEQ ID NO: 4312 - DNA, 26 bp, Artificial Sequence
  Description of Artificial Sequence: Synthetic probe
aagtggacagggccacagtggacttg

SEQ ID NO: 4313 - DNA, 19 bp, Artificial Sequence
  Description of Artificial Sequence: Synthetic primer
ttcgcctaccgcagtgaac

SEQ ID NO: 4314 - DNA, 19 bp, Artificial Sequence
  Description of Artificial Sequence: Synthetic primer
tgcgagcccatgtctcaac

SEQ ID NO: 4315 - DNA, 45 bp, Artificial Sequence
  Description of Artificial Sequence: Synthetic primer
  Description of Combined DNA/RNA Molecule: Synthetic primer
tgcgagcccatgtctcaacgaggctgtcctgagctcacttgggct

SEQ ID NO: 4316 - DNA, 36 bp, Artificial Sequence
  Description of Artificial Sequence: Synthetic primer
  Description of Combined DNA/RNA Molecule: Synthetic primer
acgacgacgacgaagcagaggtgcctggccaggcta

SEQ ID NO: 4317 - DNA, 35 bp, Artificial Sequence
  Description of Artificial Sequence: Synthetic primer
  Description of Combined DNA/RNA Molecule: Synthetic primer
acgacgacgacgaagggtgcctggccaggcuggcg

SEQ ID NO: 4318 - DNA, 48 bp, Artificial Sequence
  Description of Artificial Sequence: Synthetic primer
  Description of Combined DNA/RNA Molecule: Synthetic primer
acgacgacgacttgacgaacataatgtgccccatgtggctgccctgct

SEQ ID NO: 4319 - DNA, 49 bp, Artificial Sequence
  Description of Artificial Sequence: Synthetic oligonucleotide
  Description of Combined DNA/RNA Molecule: Synthetic oligonucleotide
ttgcatttcgttagcgacacagcagcaggcagttcagacacccagagat

SEQ ID NO: 4320 - DNA, 45 bp, Artificial Sequence
  Description of Artificial Sequence: Synthetic oligonucleotide
gaggccagcagggcttttgagaccctgtgagtcgatctacccgca

SEQ ID NO: 4321 - DNA, 22 bp, Artificial Sequence
  Description of Artificial Sequence: Synthetic probe
ttacacccagaggccagcaggg

SEQ ID NO: 4322 - DNA, 21 bp, Artificial Sequence
  Description of Artificial Sequence: Synthetic primer
ttgcatttcgttagcgacaca

SEQ ID NO: 4323 - DNA, 20 bp, Artificial Sequence
  Description of Artificial Sequence: Synthetic primer
tgcgggtagatcgactcaca

SEQ ID NO: 4324 - DNA, 43 bp, Artificial Sequence
  Description of Artificial Sequence: Synthetic primer
  Description of Combined DNA/RNA Molecule: Synthetic primer
tgcgggtagatcgactcacagccccatgtggctgccttgccct

SEQ ID NO: 4325 - DNA, 37 bp, Artificial Sequence
  Description of Artificial Sequence: Synthetic primer
  Description of Combined DNA/RNA Molecule: Synthetic primer
acgacgacgacgaacccttagaggctgaggcaggacc

SEQ ID NO: 4326 - DNA, 38 bp, Artificial Sequence
  Description of Artificial Sequence: Synthetic primer
  Description of Combined DNA/RNA Molecule: Synthetic primer
acgacgacgacgaagggctgaggcaggacttccctgga

SEQ ID NO: 4327 - DNA, 53 bp, Artificial Sequence
  Description of Artificial Sequence: Synthetic primer
  Description of Combined DNA/RNA Molecule: Synthetic primer
acgacgacgacttgacgaacataatctagggagggccttacctgtggaugacc

SEQ ID NO: 4328 - DNA, 52 bp, Artificial Sequence
  Description of Artificial Sequence: Synthetic oligonucleotide
  Description of Combined DNA/RNA Molecule: Synthetic oligonucleotide
ttgcatttcgttagcgacacagaggagtgttcactcccacatttccaatttt

SEQ ID NO: 4329 - DNA, 54 bp, Artificial Sequence
  Description of Artificial Sequence: Synthetic oligonucleotide
attccactctcttccatttctgtcactgcagtcatgtgagtcgatctacccgca

SEQ ID NO: 4330 - DNA, 36 bp, Artificial Sequence
  Description of Artificial Sequence: Synthetic probe
ttatttccaattccactctcttccatttctgtcact

SEQ ID NO: 4331 - DNA, 21 bp, Artificial Sequence
  Description of Artificial Sequence: Synthetic primer
ttgcatttcgttagcgacaca

SEQ ID NO: 4332 - DNA, 20 bp, Artificial Sequence
  Description of Artificial Sequence: Synthetic primer
tgcgggtagatcgactcaca

SEQ ID NO: 4333 - DNA, 47 bp, Artificial Sequence
  Description of Artificial Sequence: Synthetic primer
  Description of Combined DNA/RNA Molecule: Synthetic primer
tgcgggtagatcgactcacaagggagggccttacctgtgggtgacta

SEQ ID NO: 4334 - DNA, 42 bp, Artificial Sequence
  Description of Artificial Sequence: Synthetic primer
  Description of Combined DNA/RNA Molecule: Synthetic primer
acgacgacgacgaacagtccagggagccattgttccactccg

SEQ ID NO: 4335 - DNA, 43 bp, Artificial Sequence
  Description of Artificial Sequence: Synthetic primer
  Description of Combined DNA/RNA Molecule: Synthetic primer
acgacgacgacgaaccagggagccattgttccactccaggtcc

SEQ ID NO: 4336 - DNA, 55 bp, Artificial Sequence
  Description of Artificial Sequence: Synthetic primer
  Description of Combined DNA/RNA Molecule: Synthetic primer
acgacgacgacttgacgaacataatagcttggattccaaatcctgcaggcagctc

SEQ ID NO: 4337 - DNA, 51 bp, Artificial Sequence
  Description of Artificial Sequence: Synthetic oligonucleotide
  Description of Combined DNA/RNA Molecule: Synthetic oligonucleotide
taccactcatcttctgcgacagccacaacagagaccagttagaacagactt

SEQ ID NO: 4338 - DNA, 46 bp, Artificial Sequence
  Description of Artificial Sequence: Synthetic oligonucleotide
gaccctggagccaggaaatcagggactgtgagtcgatctacccgca

SEQ ID NO: 4339 - DNA, 27 bp, Artificial Sequence
  Description of Artificial Sequence: Synthetic probe
aatagaacagaccctggagccaggaaa

SEQ ID NO: 4340 - DNA, 21 bp, Artificial Sequence
  Description of Artificial Sequence: Synthetic primer
taccactcatcttctgcgaca

SEQ ID NO: 4341 - DNA, 20 bp, Artificial Sequence
  Description of Artificial Sequence: Synthetic primer
tgcgggtagatcgactcaca

SEQ ID NO: 4342 - DNA, 44 bp, Artificial Sequence
  Description of Artificial Sequence: Synthetic primer
  Description of Combined DNA/RNA Molecule: Synthetic primer
tgcgggtagatcgactcacaagcttgcctcccagtccttgaggc

SEQ ID NO: 4343 - DNA, 39 bp, Artificial Sequence
  Description of Artificial Sequence: Synthetic primer
  Description of Combined DNA/RNA Molecule: Synthetic primer
acgacgacgacgaacctcccttcccaggcagtcaaggtt

SEQ ID NO: 4344 - DNA, 41 bp, Artificial Sequence
  Description of Artificial Sequence: Synthetic primer
  Description of Combined DNA/RNA Molecule: Synthetic primer
acgacgacgacgaacccttcccaggcagtcaaggtccctct

SEQ ID NO: 4345 - DNA, 53 bp, Artificial Sequence
  Description of Artificial Sequence: Synthetic primer
  Description of Combined DNA/RNA Molecule: Synthetic primer
acgacgacgacttgacgaacataatggtcacatggctcagagctgagcagaga

SEQ ID NO: 4346 - DNA, 48 bp, Artificial Sequence
  Description of Artificial Sequence: Synthetic oligonucleotide
  Description of Combined DNA/RNA Molecule: Synthetic oligonucleotide
tctcatgggcgctagtatcaaccctccctacctctgccccgcactcca

SEQ ID NO: 4347 - DNA, 51 bp, Artificial Sequence
  Description of Artificial Sequence: Synthetic oligonucleotide
ctctgggaggctccttgttccacaaccacgtttccctgattgatacccgca

SEQ ID NO: 4348 - DNA, 21 bp, Artificial Sequence
  Description of Artificial Sequence: Synthetic probe
aaccccgcactctgggaggct

SEQ ID NO: 4349 - DNA, 22 bp, Artificial Sequence
  Description of Artificial Sequence: Synthetic primer
tctcatgggcgctagtatcaac

SEQ ID NO: 4350 - DNA, 22 bp, Artificial Sequence
  Description of Artificial Sequence: Synthetic primer
tgcgggtatcaatcagggaaac

SEQ ID NO: 4351 - DNA, 51 bp, Artificial Sequence
  Description of Artificial Sequence: Synthetic primer
  Description of Combined DNA/RNA Molecule: Synthetic primer
tgcgggtatcaatcagggaaacggatcaaagaggctttgtggttatggaat

SEQ ID NO: 4352 - DNA, 49 bp, Artificial Sequence
  Description of Artificial Sequence: Synthetic primer
  Description of Combined DNA/RNA Molecule: Synthetic primer
acgacgacgacgaagcaggtttgcttttattggtttgttctgcactcct

SEQ ID NO: 4353 - DNA, 41 bp, Artificial Sequence
  Description of Artificial Sequence: Synthetic primer
  Description of Combined DNA/RNA Molecule: Synthetic primer
acgacgacgacgaaccacacccattggcaggtttgcutttg

SEQ ID NO: 4354 - DNA, 54 bp, Artificial Sequence
  Description of Artificial Sequence: Synthetic primer
  Description of Combined DNA/RNA Molecule: Synthetic primer
acgacgacgacttgacgaacataatagtgctcccaggaaggaggaaaacctgga

SEQ ID NO: 4355 - DNA, 46 bp, Artificial Sequence
  Description of Artificial Sequence: Synthetic oligonucleotide
  Description of Combined DNA/RNA Molecule: Synthetic oligonucleotide
tggatcgagacggaatgcaacctccctcccaccttctgacacagat

SEQ ID NO: 4356 - DNA, 52 bp, Artificial Sequence
  Description of Artificial Sequence: Synthetic oligonucleotide
caggcactggatgctagccattttgctccagtttccctgattgatacccgca

SEQ ID NO: 4357 - DNA, 27 bp, Artificial Sequence
  Description of Artificial Sequence: Synthetic probe
aatctgacacaggcactggatgctagc

SEQ ID NO: 4358 - DNA, 21 bp, Artificial Sequence
  Description of Artificial Sequence: Synthetic primer
tggatcgagacggaatgcaac

SEQ ID NO: 4359 - DNA, 22 bp, Artificial Sequence
  Description of Artificial Sequence: Synthetic primer
tgcgggtatcaatcagggaaac

SEQ ID NO: 4360 - DNA, 57 bp, Artificial Sequence
  Description of Artificial Sequence: Synthetic primer
  Description of Combined DNA/RNA Molecule: Synthetic primer
tgcgggtatcaatcagggaaacctgggcttcttatatctcctggagcaaagtggatg

SEQ ID NO: 4361 - DNA, 46 bp, Artificial Sequence
  Description of Artificial Sequence: Synthetic primer
  Description of Combined DNA/RNA Molecule: Synthetic primer
acgacgacgacgaagccacagacaatggactcattgacacaggcat

SEQ ID NO: 4362 - DNA, 44 bp, Artificial Sequence
  Description of Artificial Sequence: Synthetic primer
  Description of Combined DNA/RNA Molecule: Synthetic primer
acgacgacgacgaatagagttctccacagccacagacaauggat

SEQ ID NO: 4363 - DNA, 59 bp, Artificial Sequence
  Description of Artificial Sequence: Synthetic primer
  Description of Combined DNA/RNA Molecule: Synthetic primer
acgacgacgacttgacgaacataatgttttggtgatttcttcagggaaaagtgccaccc

SEQ ID NO: 4364 - DNA, 50 bp, Artificial Sequence
  Description of Artificial Sequence: Synthetic oligonucleotide
  Description of Combined DNA/RNA Molecule: Synthetic oligonucleotide
tcctgagggacaaatacacaccggcacacagagattaggtgctcaggctt

SEQ ID NO: 4365 - DNA, 46 bp, Artificial Sequence
  Description of Artificial Sequence: Synthetic oligonucleotide
ggccccacagcctttcactctctgcggtaggtaaggaagtcacgca

SEQ ID NO: 4366 - DNA, 22 bp, Artificial Sequence
  Description of Artificial Sequence: Synthetic probe
ttgtgctcaggccccacagcct

SEQ ID NO: 4367 - DNA, 22 bp, Artificial Sequence
  Description of Artificial Sequence: Synthetic primer
tcctgagggacaaatacacacc

SEQ ID NO: 4368 - DNA, 21 bp, Artificial Sequence
  Description of Artificial Sequence: Synthetic primer
tgcgtgacttccttacctacc

SEQ ID NO: 4369 - DNA, 51 bp, Artificial Sequence
  Description of Artificial Sequence: Synthetic primer
  Description of Combined DNA/RNA Molecule: Synthetic primer
acgacgacgacgaatctaaatgttagaaaattgtgccatctacccactata

SEQ ID NO: 4370 - DNA, 50 bp, Artificial Sequence
  Description of Artificial Sequence: Synthetic primer
  Description of Combined DNA/RNA Molecule: Synthetic primer
acgacgacgacgaaaatgttagaaaattgtgccatctacccactaugcta

SEQ ID NO: 4371 - DNA, 48 bp, Artificial Sequence
  Description of Artificial Sequence: Synthetic primer
  Description of Combined DNA/RNA Molecule: Synthetic primer
acgacgacgacttgacgaacataatccccctcctcctgctgccugtga

SEQ ID NO: 4372 - DNA, 53 bp, Artificial Sequence
  Description of Artificial Sequence: Synthetic oligonucleotide
  Description of Combined DNA/RNA Molecule: Synthetic oligonucleotide
ttgcaacaggctaccgaccgctgagtactgtcacactcagagaccccagggct

SEQ ID NO: 4373 - DNA, 46 bp, Artificial Sequence
  Description of Artificial Sequence: Synthetic oligonucleotide
gggacctccaggcaggcttcaatgcggtaggtaaggaagtcacgca

SEQ ID NO: 4374 - DNA, 22 bp, Artificial Sequence
  Description of Artificial Sequence: Synthetic probe
ttgaccccagggacctccaggc

SEQ ID NO: 4375 - DNA, 19 bp, Artificial Sequence
  Description of Artificial Sequence: Synthetic primer
ttgcaacaggctaccgacc

SEQ ID NO: 4376 - DNA, 21 bp, Artificial Sequence
  Description of Artificial Sequence: Synthetic primer
tgcgtgacttccttacctacc

SEQ ID NO: 4377 - DNA, 45 bp, Artificial Sequence
  Description of Artificial Sequence: Synthetic primer
  Description of Combined DNA/RNA Molecule: Synthetic primer
tgcgtgacttccttacctaccccctcctcctgctgcctatggcct

SEQ ID NO: 4378 - DNA, 38 bp, Artificial Sequence
  Description of Artificial Sequence: Synthetic primer
  Description of Combined DNA/RNA Molecule: Synthetic primer
acgacgacgacgaactccaggcaccccatcccauccct

SEQ ID NO: 4379 - DNA, 39 bp, Artificial Sequence
  Description of Artificial Sequence: Synthetic primer
  Description of Combined DNA/RNA Molecule: Synthetic primer
acgacgacgacgaaccaggcaccccatcccatccccaga

SEQ ID NO: 4380 - DNA, 50 bp, Artificial Sequence
  Description of Artificial Sequence: Synthetic primer
  Description of Combined DNA/RNA Molecule: Synthetic primer
acgacgacgacttgacgaacataatctggtggctggcctctgagagggac

SEQ ID NO: 4381 - DNA, 44 bp, Artificial Sequence
  Description of Artificial Sequence: Synthetic oligonucleotide
  Description of Combined DNA/RNA Molecule: Synthetic oligonucleotide
taagcctgcttttccgaaacaaccaggtccctgccctcaacttc

SEQ ID NO: 4382 - DNA, 45 bp, Artificial Sequence
  Description of Artificial Sequence: Synthetic oligonucleotide
actctagctccccaggaggcagccttgtattgcgccaggatagca

SEQ ID NO: 4383 - DNA, 27 bp, Artificial Sequence
  Description of Artificial Sequence: Synthetic probe
aagccctcaactctagctccccaggag

SEQ ID NO: 4384 - DNA, 22 bp, Artificial Sequence
  Description of Artificial Sequence: Synthetic primer
taagcctgcttttccgaaacaa

SEQ ID NO: 4385 - DNA, 21 bp, Artificial Sequence
  Description of Artificial Sequence: Synthetic primer
tgctatcctggcgcaatacaa

SEQ ID NO: 4386 - DNA, 44 bp, Artificial Sequence
  Description of Artificial Sequence: Synthetic primer
  Description of Combined DNA/RNA Molecule: Synthetic primer
tgctatcctggcgcaatacaacctagctgggctgaggttgcctt

SEQ ID NO: 4387 - DNA, 48 bp, Artificial Sequence
  Description of Artificial Sequence: Synthetic primer
  Description of Combined DNA/RNA Molecule: Synthetic primer
acgacgacgacgaaaatcatagaccaaccaggtaaaggcaaagggata

SEQ ID NO: 4388 - DNA, 55 bp, Artificial Sequence
  Description of Artificial Sequence: Synthetic primer
  Description of Combined DNA/RNA Molecule: Synthetic primer
acgacgacgacttgacgaacataatgcctcactggatcataggtggtggaattgg

SEQ ID NO: 4389 - DNA, 49 bp, Artificial Sequence
  Description of Artificial Sequence: Synthetic oligonucleotide
  Description of Combined DNA/RNA Molecule: Synthetic oligonucleotide
ttggcaactctccacccaaccttccttatcctgccacctcatcagggat

SEQ ID NO: 4390 - DNA, 47 bp, Artificial Sequence
  Description of Artificial Sequence: Synthetic oligonucleotide
ggagccaggacatcctccccaacatcttgtattgcgccaggatagca

SEQ ID NO: 4391 - DNA, 26 bp, Artificial Sequence
  Description of Artificial Sequence: Synthetic probe
aactcatcaggagccaggacatcctc

SEQ ID NO: 4392 - DNA, 19 bp, Artificial Sequence
  Description of Artificial Sequence: Synthetic primer
ttggcaactctccacccaa

SEQ ID NO: 4393 - DNA, 21 bp, Artificial Sequence
  Description of Artificial Sequence: Synthetic primer
tgctatcctggcgcaatacaa

SEQ ID NO: 4394 - DNA, 52 bp, Artificial Sequence
  Description of Artificial Sequence: Synthetic primer
  Description of Combined DNA/RNA Molecule: Synthetic primer
tgctatcctggcgcaatacaatcataggtggtggaattgagggtggtgttga

SEQ ID NO: 4395 - DNA, 50 bp, Artificial Sequence
  Description of Artificial Sequence: Synthetic primer
  Description of Combined DNA/RNA Molecule: Synthetic primer
acgacgacgacgaagaaatttcaggaggatctttcagaagatgcauttct

SEQ ID NO: 4396 - DNA, 51 bp, Artificial Sequence
  Description of Artificial Sequence: Synthetic primer
  Description of Combined DNA/RNA Molecule: Synthetic primer
acgacgacgacgaatttcaggaggatctttcagaagatgcatttccaattc

SEQ ID NO: 4397 - DNA, 59 bp, Artificial Sequence
  Description of Artificial Sequence: Synthetic primer
  Description of Combined DNA/RNA Molecule: Synthetic primer
acgacgacgacttgacgaacataatctgattcccactccagtcctttgaaagtgutgct

SEQ ID NO: 4398 - DNA, 49 bp, Artificial Sequence
  Description of Artificial Sequence: Synthetic oligonucleotide
  Description of Combined DNA/RNA Molecule: Synthetic oligonucleotide
tcgacgaatctgctcagacaagaggaggcatcagctcttcatcagaggt

SEQ ID NO: 4399 - DNA, 56 bp, Artificial Sequence
  Description of Artificial Sequence: Synthetic oligonucleotide
gagacccaaatacaacaaatcaagtcacctgccctggttgaagcagcgtctgagca

SEQ ID NO: 4400 - DNA, 37 bp, Artificial Sequence
  Description of Artificial Sequence: Synthetic probe
aattcatcagagacccaaatacaacaaatcaagtcac

SEQ ID NO: 4401 - DNA, 21 bp, Artificial Sequence
  Description of Artificial Sequence: Synthetic primer
tcgacgaatctgctcagacaa

SEQ ID NO: 4402 - DNA, 19 bp, Artificial Sequence
  Description of Artificial Sequence: Synthetic primer
tgctcagacgctgcttcaa

SEQ ID NO: 4403 - DNA, 52 bp, Artificial Sequence
  Description of Artificial Sequence: Synthetic primer
  Description of Combined DNA/RNA Molecule: Synthetic primer
tgctcagacgctgcttcaaattcccactccagtcctttgaaagtgctgccaa

SEQ ID NO: 4404 - DNA, 40 bp, Artificial Sequence
  Description of Artificial Sequence: Synthetic primer
  Description of Combined DNA/RNA Molecule: Synthetic primer
acgacgacgacgaagaggaaccatggcagaggtcaaggct

SEQ ID NO: 4405 - DNA, 38 bp, Artificial Sequence
  Description of Artificial Sequence: Synthetic primer
  Description of Combined DNA/RNA Molecule: Synthetic primer
acgacgacgacgaaccatggcagaggtcaaggccagcg

SEQ ID NO: 4406 - DNA, 51 bp, Artificial Sequence
  Description of Artificial Sequence: Synthetic primer
  Description of Combined DNA/RNA Molecule: Synthetic primer
acgacgacgacttgacgaacataatcccttgttgtgtgtcctgggcuctga

SEQ ID NO: 4407 - DNA, 43 bp, Artificial Sequence
  Description of Artificial Sequence: Synthetic oligonucleotide
  Description of Combined DNA/RNA Molecule: Synthetic oligonucleotide
tcgacgaatctgctcagacaaagcatgaggtgaggacaccaaa

SEQ ID NO: 4408 - DNA, 37 bp, Artificial Sequence
  Description of Artificial Sequence: Synthetic oligonucleotide
ccagggaggcaggcagggttgaagcagcgtctgagca

SEQ ID NO: 4409 - DNA, 20 bp, Artificial Sequence
  Description of Artificial Sequence: Synthetic probe
aagaggacaccaggagggca

SEQ ID NO: 4410 - DNA, 21 bp, Artificial Sequence
  Description of Artificial Sequence: Synthetic primer
tcgacgaatctgctcagacaa

SEQ ID NO: 4411 - DNA, 19 bp, Artificial Sequence
  Description of Artificial Sequence: Synthetic primer
tgctcagacgctgcttcaa

SEQ ID NO: 4412 - DNA, 41 bp, Artificial Sequence
  Description of Artificial Sequence: Synthetic primer
  Description of Combined DNA/RNA Molecule: Synthetic primer
tgctcagacgctgcttcaacctgggctctgggccttgccta

SEQ ID NO: 4413 - DNA, 38 bp, Artificial Sequence
  Description of Artificial Sequence: Synthetic primer
  Description of Combined DNA/RNA Molecule: Synthetic primer
acgacgacgacgaacaggccagctccattggcaccaga

SEQ ID NO: 4414 - DNA, 35 bp, Artificial Sequence
  Description of Artificial Sequence: Synthetic primer
  Description of Combined DNA/RNA Molecule: Synthetic primer
acgacgacgacgaagctgggcaggccaggccagcc

SEQ ID NO: 4415 - DNA, 58 bp, Artificial Sequence
  Description of Artificial Sequence: Synthetic primer
  Description of Combined DNA/RNA Molecule: Synthetic primer
acgacgacgacttgacgaacataatgtattcttcctggaactgatgtgaggtcagaag

SEQ ID NO: 4416 - DNA, 44 bp, Artificial Sequence
  Description of Artificial Sequence: Synthetic oligonucleotide
  Description of Combined DNA/RNA Molecule: Synthetic oligonucleotide
tttccgccgctacaaccaacaggcaggtggaggaatacactgga

SEQ ID NO: 4417 - DNA, 50 bp, Artificial Sequence
  Description of Artificial Sequence: Synthetic oligonucleotide
ctgagaggacccatccagcttgcttaaaagcttgaagcagcgtctgagca

SEQ ID NO: 4418 - DNA, 31 bp, Artificial Sequence
  Description of Artificial Sequence: Synthetic probe
ttgaatacactgagaggacccatccagcttg

SEQ ID NO: 4419 - DNA, 19 bp, Artificial Sequence
  Description of Artificial Sequence: Synthetic primer
tttccgccgctacaaccaa

SEQ ID NO: 4420 - DNA, 19 bp, Artificial Sequence
  Description of Artificial Sequence: Synthetic primer
tgctcagacgctgcttcaa

SEQ ID NO: 4421 - DNA, 39 bp, Artificial Sequence
  Description of Artificial Sequence: Synthetic primer
  Description of Combined DNA/RNA Molecule: Synthetic primer
acgacgacgacgaaccacaggttgctagaggccaggccg

SEQ ID NO: 4422 - DNA, 43 bp, Artificial Sequence
  Description of Artificial Sequence: Synthetic primer
  Description of Combined DNA/RNA Molecule: Synthetic primer
acgacgacgacgaagaggccaaaatctccacaggttgcuagga

SEQ ID NO: 4423 - DNA, 48 bp, Artificial Sequence
  Description of Artificial Sequence: Synthetic primer
  Description of Combined DNA/RNA Molecule: Synthetic primer
acgacgacgacttgacgaacataatgttgggccccaggttgcagccag

SEQ ID NO: 4424 - DNA, 45 bp, Artificial Sequence
  Description of Artificial Sequence: Synthetic oligonucleotide
  Description of Combined DNA/RNA Molecule: Synthetic oligonucleotide
tcagtgaaaacacatccacccagccagggctcagtggacagggtc

SEQ ID NO: 4425 - DNA, 42 bp, Artificial Sequence
  Description of Artificial Sequence: Synthetic oligonucleotide
gggctgaccacaggaactgggcctggtgagcagggatgagca

SEQ ID NO: 4426 - DNA, 26 bp, Artificial Sequence
  Description of Artificial Sequence: Synthetic probe
ttgtggacagggctgaccacaggaac

SEQ ID NO: 4427 - DNA, 22 bp, Artificial Sequence
  Description of Artificial Sequence: Synthetic primer
tcagtgaaaacacatccaccca

SEQ ID NO: 4428 - DNA, 19 bp, Artificial Sequence
  Description of Artificial Sequence: Synthetic primer
tgctcatccctgctcacca

SEQ ID NO: 4429 - DNA, 42 bp, Artificial Sequence
  Description of Artificial Sequence: Synthetic primer
  Description of Combined DNA/RNA Molecule: Synthetic primer
acgacgacgacgaagtgccacaaactccatcccctcagcagc

SEQ ID NO: 4430 - DNA, 41 bp, Artificial Sequence
  Description of Artificial Sequence: Synthetic primer
  Description of Combined DNA/RNA Molecule: Synthetic primer
acgacgacgacgaagccacagcagtgccacaaactccatct

SEQ ID NO: 4431 - DNA, 51 bp, Artificial Sequence
  Description of Artificial Sequence: Synthetic primer
  Description of Combined DNA/RNA Molecule: Synthetic primer
acgacgacgacttgacgaacataatgtgttggtgccctgaggagtcagggt

SEQ ID NO: 4432 - DNA, 47 bp, Artificial Sequence
  Description of Artificial Sequence: Synthetic oligonucleotide
  Description of Combined DNA/RNA Molecule: Synthetic oligonucleotide
tcgtagactcgctatcgccacagtcaccacccacaatcctcacaaat

SEQ ID NO: 4433 - DNA, 44 bp, Artificial Sequence
  Description of Artificial Sequence: Synthetic oligonucleotide
caagccactccccaaggtcccaccttggtgagcagggatgagca

SEQ ID NO: 4434 - DNA, 26 bp, Artificial Sequence
  Description of Artificial Sequence: Synthetic probe
ttatcctcacaagccactccccaagg

SEQ ID NO: 4435 - DNA, 20 bp, Artificial Sequence
  Description of Artificial Sequence: Synthetic primer
tcgtagactcgctatcgcca

SEQ ID NO: 4436 - DNA, 19 bp, Artificial Sequence
  Description of Artificial Sequence: Synthetic primer
tgctcatccctgctcacca

SEQ ID NO: 4437 - DNA, 44 bp, Artificial Sequence
  Description of Artificial Sequence: Synthetic primer
  Description of Combined DNA/RNA Molecule: Synthetic primer
tgctcatccctgctcaccagggatggtgggatgggagatgggat

SEQ ID NO: 4438 - DNA, 39 bp, Artificial Sequence
  Description of Artificial Sequence: Synthetic primer
  Description of Combined DNA/RNA Molecule: Synthetic primer
acgacgacgacgaaccctctcccagcctgcaacaggtct

SEQ ID NO: 4439 - DNA, 39 bp, Artificial Sequence
  Description of Artificial Sequence: Synthetic primer
  Description of Combined DNA/RNA Molecule: Synthetic primer
acgacgacgacgaactccctctcccagcctgcaacaggc

SEQ ID NO: 4440 - DNA, 52 bp, Artificial Sequence
  Description of Artificial Sequence: Synthetic primer
  Description of Combined DNA/RNA Molecule: Synthetic primer
acgacgacgacttgacgaacataatgggctgtgtgatgctgattggcutcct

SEQ ID NO: 4441 - DNA, 51 bp, Artificial Sequence
  Description of Artificial Sequence: Synthetic oligonucleotide
  Description of Combined DNA/RNA Molecule: Synthetic oligonucleotide
ttgcacccgcgacataaccggtccttcttcctggacactcacagcacaggt

SEQ ID NO: 4442 - DNA, 53 bp, Artificial Sequence
  Description of Artificial Sequence: Synthetic oligonucleotide
cagacccagttctcactcccactgagtgtcaggtaattcactcgaacggagca

SEQ ID NO: 4443 - DNA, 29 bp, Artificial Sequence
  Description of Artificial Sequence: Synthetic probe
aacacagcacagacccagttctcactccc

SEQ ID NO: 4444 - DNA, 19 bp, Artificial Sequence
  Description of Artificial Sequence: Synthetic primer
ttgcacccgcgacataacc

SEQ ID NO: 4445 - DNA, 22 bp, Artificial Sequence
  Description of Artificial Sequence: Synthetic primer
tgctccgttcgagtgaattacc

SEQ ID NO: 4446 - DNA, 53 bp, Artificial Sequence
  Description of Artificial Sequence: Synthetic primer
  Description of Combined DNA/RNA Molecule: Synthetic primer
tgctccgttcgagtgaattaccatgctgattggcttccctagaaacttgacat

SEQ ID NO: 4447 - DNA, 37 bp, Artificial Sequence
  Description of Artificial Sequence: Synthetic primer
  Description of Combined DNA/RNA Molecule: Synthetic primer
acgacgacgacgaatgcctccccaaccccacagggct

SEQ ID NO: 4448 - DNA, 36 bp, Artificial Sequence
  Description of Artificial Sequence: Synthetic primer
  Description of Combined DNA/RNA Molecule: Synthetic primer
acgacgacgacgaacccaaccccacagggccctcta

SEQ ID NO: 4449 - DNA, 49 bp, Artificial Sequence
  Description of Artificial Sequence: Synthetic primer
  Description of Combined DNA/RNA Molecule: Synthetic primer
acgacgacgacttgacgaacataatggtcatgtgctggccctgcuactc

SEQ ID NO: 4450 - DNA, 48 bp, Artificial Sequence
  Description of Artificial Sequence: Synthetic oligonucleotide
  Description of Combined DNA/RNA Molecule: Synthetic oligonucleotide
tccggcctttgacgataccctggcatgcctcaaggacactccacactc

SEQ ID NO: 4451 - DNA, 45 bp, Artificial Sequence
  Description of Artificial Sequence: Synthetic oligonucleotide
cacctgctcctttggcccccagcggtaattcactcgaacggagca

SEQ ID NO: 4452 - DNA, 26 bp, Artificial Sequence
  Description of Artificial Sequence: Synthetic probe
ttcactccacacctgctcctttggcc

SEQ ID NO: 4453 - DNA, 19 bp, Artificial Sequence
  Description of Artificial Sequence: Synthetic primer
tccggcctttgacgatacc

SEQ ID NO: 4454 - DNA, 22 bp, Artificial Sequence
  Description of Artificial Sequence: Synthetic primer
tgctccgttcgagtgaattacc

SEQ ID NO: 4455 - DNA, 48 bp, Artificial Sequence
  Description of Artificial Sequence: Synthetic primer
  Description of Combined DNA/RNA Molecule: Synthetic primer
tgctccgttcgagtgaattacctggccctgctacttgtgagttgggaa

SEQ ID NO: 4456 - DNA, 42 bp, Artificial Sequence
  Description of Artificial Sequence: Synthetic primer
  Description of Combined DNA/RNA Molecule: Synthetic primer
acgacgacgacgaactccagctccaagatccaccccaaggcc

SEQ ID NO: 4457 - DNA, 40 bp, Artificial Sequence
  Description of Artificial Sequence: Synthetic primer
  Description of Combined DNA/RNA Molecule: Synthetic primer
acgacgacgacgaaccccccacaagtctccagctccaagg

SEQ ID NO: 4458 - DNA, 58 bp, Artificial Sequence
  Description of Artificial Sequence: Synthetic primer
  Description of Combined DNA/RNA Molecule: Synthetic primer
acgacgacgacttgacgaacataatcctgtgaggattttggcctaaatggaaaatgag

SEQ ID NO: 4459 - DNA, 47 bp, Artificial Sequence
  Description of Artificial Sequence: Synthetic oligonucleotide
  Description of Combined DNA/RNA Molecule: Synthetic oligonucleotide
tccggcctttgacgataccctgcaggacccaccagatccccaacctg

SEQ ID NO: 4460 - DNA, 43 bp, Artificial Sequence
  Description of Artificial Sequence: Synthetic oligonucleotide
acccaggagaggcccaggcacggtaattcactcgaacggagca

SEQ ID NO: 4461 - DNA, 23 bp, Artificial Sequence
  Description of Artificial Sequence: Synthetic probe
ttatccccaacccaggagaggcc

SEQ ID NO: 4462 - DNA, 19 bp, Artificial Sequence
  Description of Artificial Sequence: Synthetic primer
tccggcctttgacgatacc

SEQ ID NO: 4463 - DNA, 22 bp, Artificial Sequence
  Description of Artificial Sequence: Synthetic primer
tgctccgttcgagtgaattacc

SEQ ID NO: 4464 - DNA, 58 bp, Artificial Sequence
  Description of Artificial Sequence: Synthetic primer
  Description of Combined DNA/RNA Molecule: Synthetic primer
tgctccgttcgagtgaattaccgcctaaatggaaaatgaaacctggtaaagatgccta

SEQ ID NO: 4465 - DNA, 36 bp, Artificial Sequence
  Description of Artificial Sequence: Synthetic primer
  Description of Combined DNA/RNA Molecule: Synthetic primer
acgacgacgacgaacccaaaggccccagccagagtg

SEQ ID NO: 4466 - DNA, 40 bp, Artificial Sequence
  Description of Artificial Sequence: Synthetic primer
  Description of Combined DNA/RNA Molecule: Synthetic primer
acgacgacgacgaagacaggagaagcccaaaggccccagt

SEQ ID NO: 4467 - DNA, 52 bp, Artificial Sequence
  Description of Artificial Sequence: Synthetic primer
  Description of Combined DNA/RNA Molecule: Synthetic primer
acgacgacgacttgacgaacataatccttcctgggtcattcctggcagggaa

SEQ ID NO: 4468 - DNA, 52 bp, Artificial Sequence
  Description of Artificial Sequence: Synthetic oligonucleotide
  Description of Combined DNA/RNA Molecule: Synthetic oligonucleotide
tcgcggaaagtcccagtaacgagtattccaggaacctgggatcttcagctct

SEQ ID NO: 4469 - DNA, 49 bp, Artificial Sequence
  Description of Artificial Sequence: Synthetic oligonucleotide
gcttccatccactctgcccctacctcatcgttggcctgtaagcgttcca

SEQ ID NO: 4470 - DNA, 29 bp, Artificial Sequence
  Description of Artificial Sequence: Synthetic probe
ttatcttcagcttccatccactctgcccc

SEQ ID NO: 4471 - DNA, 20 bp, Artificial Sequence
  Description of Artificial Sequence: Synthetic primer
tcgcggaaagtcccagtaac

SEQ ID NO: 4472 - DNA, 20 bp, Artificial Sequence
  Description of Artificial Sequence: Synthetic primer
tggaacgcttacaggccaac

SEQ ID NO: 4473 - DNA, 48 bp, Artificial Sequence
  Description of Artificial Sequence: Synthetic primer
  Description of Combined DNA/RNA Molecule: Synthetic primer
tggaacgcttacaggccaacgtcattcctggcagggaggtggtgaggc

SEQ ID NO: 4474 - DNA, 38 bp, Artificial Sequence; identical to SEQ ID NO: 4200
  Description of Artificial Sequence: Synthetic primer
  Description of Combined DNA/RNA Molecule: Synthetic primer

SEQ ID NO: 4475 - DNA, 40 bp, Artificial Sequence; identical to SEQ ID NO: 4201
  Description of Artificial Sequence: Synthetic primer
  Description of Combined DNA/RNA Molecule: Synthetic primer

SEQ ID NO: 4476 - DNA, 52 bp, Artificial Sequence
  Description of Artificial Sequence: Synthetic primer
  Description of Combined DNA/RNA Molecule: Synthetic primer
acgacgacgacttgacgaacataatggaggtgcctgaccctgtggtauaaag

SEQ ID NO: 4477 - DNA, 46 bp, Artificial Sequence
  Description of Artificial Sequence: Synthetic oligonucleotide
  Description of Combined DNA/RNA Molecule: Synthetic oligonucleotide
tgaacgctcaaacacgtgaacccctgctgctgcactcatcacaggt

SEQ ID NO: 4478 - DNA, 46 bp, Artificial Sequence
  Description of Artificial Sequence: Synthetic oligonucleotide
cagactcccactagggcctctgcagggttggcctgtaagcgttcca

SEQ ID NO: 4479 - DNA, 29 bp, Artificial Sequence
  Description of Artificial Sequence: Synthetic probe
ttctcatcacagactcccactagggcctc

SEQ ID NO: 4480 - DNA, 21 bp, Artificial Sequence
  Description of Artificial Sequence: Synthetic primer
tgaacgctcaaacacgtgaac

SEQ ID NO: 4481 - DNA, 20 bp, Artificial Sequence
  Description of Artificial Sequence: Synthetic primer
tggaacgcttacaggccaac

SEQ ID NO: 4482 - DNA, 51 bp, Artificial Sequence
  Description of Artificial Sequence: Synthetic primer
  Description of Combined DNA/RNA Molecule: Synthetic primer
tggaacgcttacaggccaacggtgcctgaccctgtggtataaaaatggtgt

SEQ ID NO: 4483 - DNA, 39 bp, Artificial Sequence
  Description of Artificial Sequence: Synthetic primer
  Description of Combined DNA/RNA Molecule: Synthetic primer
acgacgacgacgaacccacagcaactgcacagcagggaa

SEQ ID NO: 4484 - DNA, 39 bp, Artificial Sequence
  Description of Artificial Sequence: Synthetic primer
  Description of Combined DNA/RNA Molecule: Synthetic primer
acgacgacgacgaacagcccacagcaactgcacagcaga

SEQ ID NO: 4485 - DNA, 54 bp, Artificial Sequence
  Description of Artificial Sequence: Synthetic primer
  Description of Combined DNA/RNA Molecule: Synthetic primer
acgacgacgacttgacgaacataatccttgcagcctctctttggtctgagggct

SEQ ID NO: 4486 - DNA, 45 bp, Artificial Sequence
  Description of Artificial Sequence: Synthetic oligonucleotide
  Description of Combined DNA/RNA Molecule: Synthetic oligonucleotide
tacacgtggatatctccgaccgggaacccagggctccgcagcatt

SEQ ID NO: 4487 - DNA, 52 bp, Artificial Sequence
  Description of Artificial Sequence: Synthetic oligonucleotide
gcacccacaggctttagttactgctccaaggggtgctagtcacacagttcca

SEQ ID NO: 4488 - DNA, 26 bp, Artificial Sequence
  Description of Artificial Sequence: Synthetic probe
ttctccgcagcacccacaggctttag

SEQ ID NO: 4489 - DNA, 21 bp, Artificial Sequence
  Description of Artificial Sequence: Synthetic primer
tacacgtggatatctccgacc

SEQ ID NO: 4490 - DNA, 21 bp, Artificial Sequence
  Description of Artificial Sequence: Synthetic primer
tggaactgtgtgactagcacc

SEQ ID NO: 4491 - DNA, 49 bp, Artificial Sequence
  Description of Artificial Sequence: Synthetic primer
  Description of Combined DNA/RNA Molecule: Synthetic primer
tggaactgtgtgactagcacccctctctttggtctgagggccctggagt

SEQ ID NO: 4492 - DNA, 44 bp, Artificial Sequence
  Description of Artificial Sequence: Synthetic primer
  Description of Combined DNA/RNA Molecule: Synthetic primer
acgacgacgacgaacctcctttccctccaccattcctcacccat

SEQ ID NO: 4493 - DNA, 44 bp, Artificial Sequence
  Description of Artificial Sequence: Synthetic primer
  Description of Combined DNA/RNA Molecule: Synthetic primer
acgacgacgacgaactttccctccaccattcctcacccactccc

SEQ ID NO: 4494 - DNA, 51 bp, Artificial Sequence
  Description of Artificial Sequence: Synthetic primer
  Description of Combined DNA/RNA Molecule: Synthetic primer
acgacgacgacttgacgaacataatgtgccttgggagctgtggagccctaa

SEQ ID NO: 4495 - DNA, 44 bp, Artificial Sequence
  Description of Artificial Sequence: Synthetic oligonucleotide
  Description of Combined DNA/RNA Molecule: Synthetic oligonucleotide
tagcattcgagaacgcacccccttcccaggtgggacgcaugaat

SEQ ID NO: 4496 - DNA, 47 bp, Artificial Sequence
  Description of Artificial Sequence: Synthetic oligonucleotide
tgagctgctttgctgcccagatggagggtgctagtcacacagttcca

SEQ ID NO: 4497 - DNA, 25 bp, Artificial Sequence
  Description of Artificial Sequence: Synthetic probe
aaggacgcatgagctgctttgctgc

SEQ ID NO: 4498 - DNA, 19 bp, Artificial Sequence
  Description of Artificial Sequence: Synthetic primer
tagcattcgagaacgcacc

SEQ ID NO: 4499 - DNA, 21 bp, Artificial Sequence
  Description of Artificial Sequence: Synthetic primer
tggaactgtgtgactagcacc

SEQ ID NO: 4500 - DNA, 49 bp, Artificial Sequence
  Description of Artificial Sequence: Synthetic primer
  Description of Combined DNA/RNA Molecule: Synthetic primer
tggaactgtgtgactagcaccgtggagccctagagcctccatttgggcg

SEQ ID NO: 4501 - DNA, 45 bp, Artificial Sequence
  Description of Artificial Sequence: Synthetic primer
  Description of Combined DNA/RNA Molecule: Synthetic primer
acgacgacgacgaaggacaacacacagttcatgcaggtcaacagc

SEQ ID NO: 4502 - DNA, 45 bp, Artificial Sequence
  Description of Artificial Sequence: Synthetic primer
  Description of Combined DNA/RNA Molecule: Synthetic primer
acgacgacgacgaacaacacacagttcatgcaggtcaacagtgat

SEQ ID NO: 4503 - DNA, 49 bp, Artificial Sequence
  Description of Artificial Sequence: Synthetic primer
  Description of Combined DNA/RNA Molecule: Synthetic primer
acgacgacgacttgacgaacataatggccttggtgcccagtgtcugtaa

SEQ ID NO: 4504 - DNA, 54 bp, Artificial Sequence
  Description of Artificial Sequence: Synthetic oligonucleotide
  Description of Combined DNA/RNA Molecule: Synthetic oligonucleotide
taaccgggcctaaagtgacagacaccatgagtctgaggatgaagacgcaggcgt

SEQ ID NO: 4505 - DNA, 45 bp, Artificial Sequence
  Description of Artificial Sequence: Synthetic oligonucleotide
ggcacagtgggtggagcaggaggtgttacgtgatctccctctcca

SEQ ID NO: 4506 - DNA, 23 bp, Artificial Sequence
  Description of Artificial Sequence: Synthetic probe
ttagacgcaggcacagtgggtgg

SEQ ID NO: 4507 - DNA, 20 bp, Artificial Sequence
  Description of Artificial Sequence: Synthetic primer
taaccgggcctaaagtgaca

SEQ ID NO: 4508 - DNA, 22 bp, Artificial Sequence
  Description of Artificial Sequence: Synthetic primer
tggagagggagatcacgtaaca

SEQ ID NO: 4509 - DNA, 54 bp, Artificial Sequence
  Description of Artificial Sequence: Synthetic primer
  Description of Combined DNA/RNA Molecule: Synthetic primer
tggagagggagatcacgtaacacccagtgtctgtaggtcccaatactttggcct

SEQ ID NO: 4510 - DNA, 39 bp, Artificial Sequence
  Description of Artificial Sequence: Synthetic primer
  Description of Combined DNA/RNA Molecule: Synthetic primer
acgacgacgacgaaccctccctacctctgccccacactt

SEQ ID NO: 4511 - DNA, 40 bp, Artificial Sequence
  Description of Artificial Sequence: Synthetic primer
  Description of Combined DNA/RNA Molecule: Synthetic primer
acgacgacgacgaaccaggcagtcaaggtccctccctact

SEQ ID NO: 4512 - DNA, 49 bp, Artificial Sequence
  Description of Artificial Sequence: Synthetic primer
  Description of Combined DNA/RNA Molecule: Synthetic primer
acgacgacgacttgacgaacataatgtggcctgcccactgggtcacaga

SEQ ID NO: 4513 - DNA, 51 bp, Artificial Sequence
  Description of Artificial Sequence: Synthetic oligonucleotide
  Description of Combined DNA/RNA Molecule: Synthetic oligonucleotide
tcgatggtcaatgagcttcacacactctgggaggctccttgtttcacaatt

SEQ ID NO: 4514 - DNA, 55 bp, Artificial Sequence
  Description of Artificial Sequence: Synthetic oligonucleotide
caaccacaaagcccctttgatcctctgctcagctgttacgtgatctccctctcca

SEQ ID NO: 4515 - DNA, 30 bp, Artificial Sequence
  Description of Artificial Sequence: Synthetic probe
aatgtttcacaaccacaaagcccctttgat

SEQ ID NO: 4516 - DNA, 22 bp, Artificial Sequence
  Description of Artificial Sequence: Synthetic primer
tcgatggtcaatgagcttcaca

SEQ ID NO: 4517 - DNA, 22 bp, Artificial Sequence
  Description of Artificial Sequence: Synthetic primer
tggagagggagatcacgtaaca

SEQ ID NO: 4518 - DNA, 49 bp, Artificial Sequence
  Description of Artificial Sequence: Synthetic primer
  Description of Combined DNA/RNA Molecule: Synthetic primer
tggagagggagatcacgtaacactgggtcacatggctcagagttgagcg

SEQ ID NO: 4519 - DNA, 41 bp, Artificial Sequence
  Description of Artificial Sequence: Synthetic primer
  Description of Combined DNA/RNA Molecule: Synthetic primer
acgacgacgacgaagttttcccccttcctgggagcactgcg

SEQ ID NO: 4520 - DNA, 38 bp, Artificial Sequence
  Description of Artificial Sequence: Synthetic primer
  Description of Combined DNA/RNA Molecule: Synthetic primer
acgacgacgacgaacccccttcctgggagcactgcagg

SEQ ID NO: 4521 - DNA, 52 bp, Artificial Sequence
  Description of Artificial Sequence: Synthetic primer
  Description of Combined DNA/RNA Molecule: Synthetic primer
acgacgacgacttgacgaacataatgttctgaggttgcatggctggagccct

SEQ ID NO: 4522 - DNA, 50 bp, Artificial Sequence
  Description of Artificial Sequence: Synthetic oligonucleotide
  Description of Combined DNA/RNA Molecule: Synthetic oligonucleotide
tcgatggtcaatgagcttcacagcagatcattcacaggcagctcagcatt

SEQ ID NO: 4523 - DNA, 46 bp, Artificial Sequence
  Description of Artificial Sequence: Synthetic oligonucleotide
gcaccctcacataggtgggccagctgttacgtgatctccctctcca

SEQ ID NO: 4524 - DNA, 27 bp, Artificial Sequence
  Description of Artificial Sequence: Synthetic probe
ttcagctcagcaccctcacataggtgg

SEQ ID NO: 4525 - DNA, 22 bp, Artificial Sequence
  Description of Artificial Sequence: Synthetic primer
tcgatggtcaatgagcttcaca

SEQ ID NO: 4526 - DNA, 22 bp, Artificial Sequence
  Description of Artificial Sequence: Synthetic primer
tggagagggagatcacgtaaca

SEQ ID NO: 4527 - DNA, 44 bp, Artificial Sequence
  Description of Artificial Sequence: Synthetic primer
  Description of Combined DNA/RNA Molecule: Synthetic primer
tggagagggagatcacgtaacactggagccccagaggttggcct

SEQ ID NO: 4528 - DNA, 37 bp, Artificial Sequence
  Description of Artificial Sequence: Synthetic primer
  Description of Combined DNA/RNA Molecule: Synthetic primer
acgacgacgacgaatgaggctccagccatgcaaccct

SEQ ID NO: 4529 - DNA, 38 bp, Artificial Sequence
  Description of Artificial Sequence: Synthetic primer
  Description of Combined DNA/RNA Molecule: Synthetic primer
acgacgacgacgaagggctccagccatgcaaccccagg

SEQ ID NO: 4530 - DNA, 52 bp, Artificial Sequence
  Description of Artificial Sequence: Synthetic primer
  Description of Combined DNA/RNA Molecule: Synthetic primer
acgacgacgacttgacgaacataatctgccccctagagctgaggaggugtga

SEQ ID NO: 4531 - DNA, 52 bp, Artificial Sequence
  Description of Artificial Sequence: Synthetic oligonucleotide
  Description of Combined DNA/RNA Molecule: Synthetic oligonucleotide
tctcgggaccacaatacgaaccagaaccacacatgtggcaaggagcaggttt

SEQ ID NO: 4532 - DNA, 46 bp, Artificial Sequence
  Description of Artificial Sequence: Synthetic oligonucleotide
ggtcccagggcagagtaggcagagtcgttacgctaagctggtgcca

SEQ ID NO: 4533 - DNA, 22 bp, Artificial Sequence
  Description of Artificial Sequence: Synthetic probe
ttaggagcaggtcccagggcag

SEQ ID NO: 4534 - DNA, 21 bp, Artificial Sequence
  Description of Artificial Sequence: Synthetic primer
tctcgggaccacaatacgaac

SEQ ID NO: 4535 - DNA, 20 bp, Artificial Sequence
  Description of Artificial Sequence: Synthetic primer
tggcaccagcttagcgtaac

SEQ ID NO: 4536 - DNA, 48 bp, Artificial Sequence
  Description of Artificial Sequence: Synthetic primer
  Description of Combined DNA/RNA Molecule: Synthetic primer
tggcaccagcttagcgtaacgaggaggtgtggctgaaggatatgctta

SEQ ID NO: 4537 - DNA, 35 bp, Artificial Sequence
  Description of Artificial Sequence: Synthetic primer
  Description of Combined DNA/RNA Molecule: Synthetic primer
acgacgacgacgaaacccagggcagggccagaagt

SEQ ID NO: 4538 - DNA, 37 bp, Artificial Sequence
  Description of Artificial Sequence: Synthetic primer
  Description of Combined DNA/RNA Molecule: Synthetic primer
acgacgacgacgaacagggcagggccagaagcugatc

SEQ ID NO: 4539 - DNA, 60 bp, Artificial Sequence
  Description of Artificial Sequence: Synthetic primer
  Description of Combined DNA/RNA Molecule: Synthetic primer
acgacgacgacttgacgaacataatcttgggcttaggcctctgatatttttggaauttga

SEQ ID NO: 4540 - DNA, 48 bp, Artificial Sequence
  Description of Artificial Sequence: Synthetic oligonucleotide
  Description of Combined DNA/RNA Molecule: Synthetic oligonucleotide
ttgctgtgcgcggtagaaccaacagacagacagacctgggacagacgt

SEQ ID NO: 4541 - DNA, 45 bp, Artificial Sequence
  Description of Artificial Sequence: Synthetic oligonucleotide
gacacactgcccacagtcccctggtgttacgctaagctggtgcca

SEQ ID NO: 4542 - DNA, 25 bp, Artificial Sequence
  Description of Artificial Sequence: Synthetic probe
tttgggacagacacactgcccacag

SEQ ID NO: 4543 - DNA, 19 bp, Artificial Sequence
  Description of Artificial Sequence: Synthetic primer
ttgctgtgcgcggtagaac

SEQ ID NO: 4544 - DNA, 20 bp, Artificial Sequence
  Description of Artificial Sequence: Synthetic primer
tggcaccagcttagcgtaac

SEQ ID NO: 4545 - DNA, 55 bp, Artificial Sequence
  Description of Artificial Sequence: Synthetic primer
  Description of Combined DNA/RNA Molecule: Synthetic primer
tggcaccagcttagcgtaacgggcttaggcctctgatatttttggaatctgggcg

SEQ ID NO: 4546 - DNA, 39 bp, Artificial Sequence
  Description of Artificial Sequence: Synthetic primer
  Description of Combined DNA/RNA Molecule: Synthetic primer
acgacgacgacgaagcctctgctctgacctggcaggaga

SEQ ID NO: 4547 - DNA, 39 bp, Artificial Sequence
  Description of Artificial Sequence: Synthetic primer
  Description of Combined DNA/RNA Molecule: Synthetic primer
acgacgacgacgaagctctgacctggcaggaggcugggc

SEQ ID NO: 4548 - DNA, 50 bp, Artificial Sequence
  Description of Artificial Sequence: Synthetic primer
  Description of Combined DNA/RNA Molecule: Synthetic primer
acgacgacgacttgacgaacataatacctgcctggtgccaatggagctga

SEQ ID NO: 4549 - DNA, 46 bp, Artificial Sequence
  Description of Artificial Sequence: Synthetic oligonucleotide
  Description of Combined DNA/RNA Molecule: Synthetic oligonucleotide
tctcgattacgctccgcaccagtccaagcacagacaggacagggca

SEQ ID NO: 4550 - DNA, 40 bp, Artificial Sequence
  Description of Artificial Sequence: Synthetic oligonucleotide
gggaggagctgggcaggcgtgtgtagcttagacatggcca

SEQ ID NO: 4551 - DNA, 22 bp, Artificial Sequence
  Description of Artificial Sequence: Synthetic probe
ttcaggacagggaggagctggg

SEQ ID NO: 4552 - DNA, 19 bp, Artificial Sequence
  Description of Artificial Sequence: Synthetic primer
tctcgattacgctccgcac

SEQ ID NO: 4553 - DNA, 22 bp, Artificial Sequence
  Description of Artificial Sequence: Synthetic primer
tggccatgtctaagctacacac

SEQ ID NO: 4554 - DNA, 46 bp, Artificial Sequence
  Description of Artificial Sequence: Synthetic primer
  Description of Combined DNA/RNA Molecule: Synthetic primer
tggccatgtctaagctacacacaatggagctggcctggcttgcccg

SEQ ID NO: 4555 - DNA, 42 bp, Artificial Sequence
  Description of Artificial Sequence: Synthetic primer
  Description of Combined DNA/RNA Molecule: Synthetic primer
acgacgacgacgaaccattcccccaggttagagcacagctct

SEQ ID NO: 4556 - DNA, 41 bp, Artificial Sequence
  Description of Artificial Sequence: Synthetic primer
  Description of Combined DNA/RNA Molecule: Synthetic primer
acgacgacgacgaacccccaggttagagcacagctccaggg

SEQ ID NO: 4557 - DNA, 51 bp, Artificial Sequence
  Description of Artificial Sequence: Synthetic primer
  Description of Combined DNA/RNA Molecule: Synthetic primer
acgacgacgacttgacgaacataatggtgccttggagtgagaggtcctgac

SEQ ID NO: 4558 - DNA, 57 bp, Artificial Sequence
  Description of Artificial Sequence: Synthetic oligonucleotide
  Description of Combined DNA/RNA Molecule: Synthetic oligonucleotide
tcacagagacttgccgatcacgaacctatgtccacacagtgtagtagggccagctgg

SEQ ID NO: 4559 - DNA, 51 bp, Artificial Sequence
  Description of Artificial Sequence: Synthetic oligonucleotide
gctaaatggagcccaggtcagagcaagatgtgtgtagcttagacatggcca

SEQ ID NO: 4560 - DNA, 23 bp, Artificial Sequence
  Description of Artificial Sequence: Synthetic probe
aaagggccagctaaatggagccc

SEQ ID NO: 4561 - DNA, 21 bp, Artificial Sequence
  Description of Artificial Sequence: Synthetic primer
tcacagagacttgccgatcac

SEQ ID NO: 4562 - DNA, 22 bp, Artificial Sequence
  Description of Artificial Sequence: Synthetic primer
tggccatgtctaagctacacac

SEQ ID NO: 4563 - DNA, 52 bp, Artificial Sequence
  Description of Artificial Sequence: Synthetic primer
  Description of Combined DNA/RNA Molecule: Synthetic primer
tggccatgtctaagctacacacccttggagtgagaggtcctgatcctgctcc

SEQ ID NO: 4564 - DNA, 52 bp, Artificial Sequence
  Description of Artificial Sequence: Synthetic primer
  Description of Combined DNA/RNA Molecule: Synthetic primer
acgacgacgacgaattgtttttattttccactttaagcataagaacaatgaa

SEQ ID NO: 4565 - DNA, 54 bp, Artificial Sequence
  Description of Artificial Sequence: Synthetic primer
  Description of Combined DNA/RNA Molecule: Synthetic primer
acgacgacgacgaaattttccactttaagcataagaacaatgagaaccaggagt

SEQ ID NO: 4566 - DNA, 51 bp, Artificial Sequence
  Description of Artificial Sequence: Synthetic primer
  Description of Combined DNA/RNA Molecule: Synthetic primer
acgacgacgacttgacgaacataatggaggagtgagtgtgctgggcuctgt

SEQ ID NO: 4567 - DNA, 45 bp, Artificial Sequence
  Description of Artificial Sequence: Synthetic oligonucleotide
  Description of Combined DNA/RNA Molecule: Synthetic oligonucleotide
tttttacgcacagcaccaccccaggcagccccacataacagtgaa

SEQ ID NO: 4568 - DNA, 52 bp, Artificial Sequence
  Description of Artificial Sequence: Synthetic oligonucleotide
gtgggagcacaggtacccaagagtaccctcggttacataggcggcttagaca

SEQ ID NO: 4569 - DNA, 32 bp, Artificial Sequence
  Description of Artificial Sequence: Synthetic probe
ttcataacagtgggagcacaggtacccaagag

SEQ ID NO: 4570 - DNA, 20 bp, Artificial Sequence
  Description of Artificial Sequence: Synthetic primer
tttttacgcacagcaccacc

SEQ ID NO: 4571 - DNA, 22 bp, Artificial Sequence
  Description of Artificial Sequence: Synthetic primer
tgtctaagccgcctatgtaacc

SEQ ID NO: 4572 - DNA, 48 bp, Artificial Sequence
  Description of Artificial Sequence: Synthetic primer
  Description of Combined DNA/RNA Molecule: Synthetic primer
tgtctaagccgcctatgtaaccgaggagtgagtgtgctgggttggcct

SEQ ID NO: 4573 - DNA, 41 bp, Artificial Sequence; identical to SEQ ID NO: 1004
  Description of Artificial Sequence: Synthetic primer
  Description of Combined DNA/RNA Molecule: Synthetic primer

SEQ ID NO: 4574 - DNA, 44 bp, Artificial Sequence; identical to SEQ ID NO: 1005
  Description of Artificial Sequence: Synthetic primer
  Description of Combined DNA/RNA Molecule: Synthetic primer

SEQ ID NO: 4575 - DNA, 53 bp, Artificial Sequence; identical to SEQ ID NO: 1006
  Description of Artificial Sequence: Synthetic primer
  Description of Combined DNA/RNA Molecule: Synthetic primer

SEQ ID NO: 4576 - DNA, 46 bp, Artificial Sequence; identical to SEQ ID NO: 1007
  Description of Artificial Sequence: Synthetic oligonucleotide
  Description of Combined DNA/RNA Molecule: Synthetic oligonucleotide

SEQ ID NO: 4577 - DNA, 48 bp, Artificial Sequence; identical to SEQ ID NO: 1008
  Description of Artificial Sequence: Synthetic oligonucleotide

SEQ ID NO: 4578 - DNA, 19 bp, Artificial Sequence
  Description of Artificial Sequence: Synthetic probe
ttgcccccaggccccaaca

SEQ ID NO: 4579 - DNA, 22 bp, Artificial Sequence
  Description of Artificial Sequence: Synthetic primer
tatctcctaaaagaagccgcac

SEQ ID NO: 4580 - DNA, 20 bp, Artificial Sequence
  Description of Artificial Sequence: Synthetic primer
tccatcgcccttaatcccac

SEQ ID NO: 4581 - DNA, 48 bp, Artificial Sequence; identical to SEQ ID NO: 1012
  Description of Artificial Sequence: Synthetic primer
  Description of Combined DNA/RNA Molecule: Synthetic primer

SEQ ID NO: 4582 - DNA, 25 bp, Artificial Sequence
  Description of Artificial Sequence: Synthetic primer
  Description of Combined DNA/RNA Molecule: Synthetic primer
acgacgacgacttgacgaacataac

SEQ ID NO: 4583 - DNA, 39 bp, Artificial Sequence; identical to SEQ ID NO: 1013
  Description of Artificial Sequence: Synthetic primer
  Description of Combined DNA/RNA Molecule: Synthetic primer

SEQ ID NO: 4584 - DNA, 41 bp, Artificial Sequence; identical to SEQ ID NO: 1014
  Description of Artificial Sequence: Synthetic primer
  Description of Combined DNA/RNA Molecule: Synthetic primer

SEQ ID NO: 4585 - DNA, 52 bp, Artificial Sequence; identical to SEQ ID NO: 1015
  Description of Artificial Sequence: Synthetic primer
  Description of Combined DNA/RNA Molecule: Synthetic primer

SEQ ID NO: 4586 - DNA, 45 bp, Artificial Sequence; identical to SEQ ID NO: 1016
  Description of Artificial Sequence: Synthetic oligonucleotide
  Description of Combined DNA/RNA Molecule: Synthetic oligonucleotide

SEQ ID NO: 4587 - DNA, 47 bp, Artificial Sequence; identical to SEQ ID NO: 1017
  Description of Artificial Sequence: Synthetic oligonucleotide

SEQ ID NO: 4588 - DNA, 26 bp, Artificial Sequence
  Description of Artificial Sequence: Synthetic probe
aacacctcaggacctagacccccacc

SEQ ID NO: 4589 - DNA, 20 bp, Artificial Sequence
  Description of Artificial Sequence: Synthetic primer
tcgctcttcagcctcctaca

SEQ ID NO: 4590 - DNA, 22 bp, Artificial Sequence
  Description of Artificial Sequence: Synthetic primer
tccggcaataattcccagaaca

SEQ ID NO: 4591 - DNA, 46 bp, Artificial Sequence; identical to SEQ ID NO: 1021
  Description of Artificial Sequence: Synthetic primer
  Description of Combined DNA/RNA Molecule: Synthetic primer

SEQ ID NO: 4592 - DNA, 42 bp, Artificial Sequence; identical to SEQ ID NO: 1022
  Description of Artificial Sequence: Synthetic primer
  Description of Combined DNA/RNA Molecule: Synthetic primer

SEQ ID NO: 4593 - DNA, 40 bp, Artificial Sequence; identical to SEQ ID NO: 1023
  Description of Artificial Sequence: Synthetic primer
  Description of Combined DNA/RNA Molecule: Synthetic primer

SEQ ID NO: 4594 - DNA, 51 bp, Artificial Sequence; identical to SEQ ID NO: 1024
  Description of Artificial Sequence: Synthetic primer
  Description of Combined DNA/RNA Molecule: Synthetic primer

SEQ ID NO: 4595 - DNA, 44 bp, Artificial Sequence; identical to SEQ ID NO: 1025
  Description of Artificial Sequence: Synthetic oligonucleotide
  Description of Combined DNA/RNA Molecule: Synthetic oligonucleotide

SEQ ID NO: 4596 - DNA, 41 bp, Artificial Sequence; identical to SEQ ID NO: 1026
  Description of Artificial Sequence: Synthetic oligonucleotide

SEQ ID NO: 4597 - DNA, 19 bp, Artificial Sequence
  Description of Artificial Sequence: Synthetic probe
tttgccgcaccccacccag

SEQ ID NO: 4598 - DNA, 19 bp, Artificial Sequence
  Description of Artificial Sequence: Synthetic primer
ttcaacgatcgcgcagaca

SEQ ID NO: 4599 - DNA, 22 bp, Artificial Sequence
  Description of Artificial Sequence: Synthetic primer
tccggcaataattcccagaaca

SEQ ID NO: 4600 - DNA, 47 bp, Artificial Sequence; identical to SEQ ID NO: 1030
  Description of Artificial Sequence: Synthetic primer
  Description of Combined DNA/RNA Molecule: Synthetic primer

SEQ ID NO: 4601 - DNA, 44 bp, Artificial Sequence; identical to SEQ ID NO: 1031
  Description of Artificial Sequence: Synthetic primer
  Description of Combined DNA/RNA Molecule: Synthetic primer

SEQ ID NO: 4602 - DNA, 43 bp, Artificial Sequence; identical to SEQ ID NO: 1032
  Description of Artificial Sequence: Synthetic primer
  Description of Combined DNA/RNA Molecule: Synthetic primer

SEQ ID NO: 4603 - DNA, 49 bp, Artificial Sequence; identical to SEQ ID NO: 1033
  Description of Artificial Sequence: Synthetic primer
  Description of Combined DNA/RNA Molecule: Synthetic primer

SEQ ID NO: 4604 - DNA, 44 bp, Artificial Sequence; identical to SEQ ID NO: 1034
  Description of Artificial Sequence: Synthetic oligonucleotide
  Description of Combined DNA/RNA Molecule: Synthetic oligonucleotide

SEQ ID NO: 4605 - DNA, 57 bp, Artificial Sequence; identical to SEQ ID NO: 1035
  Description of Artificial Sequence: Synthetic oligonucleotide

SEQ ID NO: 4606 - DNA, 33 bp, Artificial Sequence; identical to SEQ ID NO: 1036
  Description of Artificial Sequence: Synthetic probe

SEQ ID NO: 4607 - DNA, 21 bp, Artificial Sequence
  Description of Artificial Sequence: Synthetic primer
tcactatcggcgtagtcacca

SEQ ID NO: 4608 - DNA, 20 bp, Artificial Sequence
  Description of Artificial Sequence: Synthetic primer
tcctccgggtaaagtcacca

SEQ ID NO: 4609 - DNA, 42 bp, Artificial Sequence; identical to SEQ ID NO: 1039
  Description of Artificial Sequence: Synthetic primer
  Description of Combined DNA/RNA Molecule: Synthetic primer

SEQ ID NO: 4610 - DNA, 42 bp, Artificial Sequence; identical to SEQ ID NO: 1040
  Description of Artificial Sequence: Synthetic primer
  Description of Combined DNA/RNA Molecule: Synthetic primer

SEQ ID NO: 4611 - DNA, 51 bp, Artificial Sequence; identical to SEQ ID NO: 1041
  Description of Artificial Sequence: Synthetic primer
  Description of Combined DNA/RNA Molecule: Synthetic primer

SEQ ID NO: 4612 - DNA, 58 bp, Artificial Sequence; identical to SEQ ID NO: 1042
  Description of Artificial Sequence: Synthetic oligonucleotide
  Description of Combined DNA/RNA Molecule: Synthetic oligonucleotide

SEQ ID NO: 4613 - DNA, 48 bp, Artificial Sequence; identical to SEQ ID NO: 1043
  Description of Artificial Sequence: Synthetic oligonucleotide

SEQ ID NO: 4614 - DNA, 26 bp, Artificial Sequence
  Description of Artificial Sequence: Synthetic probe
ttcaccgcaataagggccagcctgta

SEQ ID NO: 4615 - DNA, 21 bp, Artificial Sequence
  Description of Artificial Sequence: Synthetic primer
tcatctgttcgtcagggtcca

SEQ ID NO: 4616 - DNA, 20 bp, Artificial Sequence
  Description of Artificial Sequence: Synthetic primer
tcctccgggtaaagtcacca

SEQ ID NO: 4617 - DNA, 46 bp, Artificial Sequence; identical to SEQ ID NO: 1047
  Description of Artificial Sequence: Synthetic primer
  Description of Combined DNA/RNA Molecule: Synthetic primer

SEQ ID NO: 4618 - DNA, 43 bp, Artificial Sequence; identical to SEQ ID NO: 1048
  Description of Artificial Sequence: Synthetic primer
  Description of Combined DNA/RNA Molecule: Synthetic primer

SEQ ID NO: 4619 - DNA, 41 bp, Artificial Sequence; identical to SEQ ID NO: 1049
  Description of Artificial Sequence: Synthetic primer
  Description of Combined DNA/RNA Molecule: Synthetic primer

SEQ ID NO: 4620 - DNA, 51 bp, Artificial Sequence; identical to SEQ ID NO: 1050
  Description of Artificial Sequence: Synthetic primer
  Description of Combined DNA/RNA Molecule: Synthetic primer

SEQ ID NO: 4621 - DNA, 47 bp, Artificial Sequence; identical to SEQ ID NO: 1051
  Description of Artificial Sequence: Synthetic oligonucleotide
  Description of Combined DNA/RNA Molecule: Synthetic oligonucleotide

SEQ ID NO: 4622 - DNA, 54 bp, Artificial Sequence; identical to SEQ ID NO: 1052
  Description of Artificial Sequence: Synthetic oligonucleotide

SEQ ID NO: 4623 - DNA, 32 bp, Artificial Sequence; identical to SEQ ID NO: 1053
  Description of Artificial Sequence: Synthetic probe

SEQ ID NO: 4624 - DNA, 19 bp, Artificial Sequence
  Description of Artificial Sequence: Synthetic primer
ttcgtacctcggcacacca

SEQ ID NO: 4625 - DNA, 20 bp, Artificial Sequence
  Description of Artificial Sequence: Synthetic primer
tcgacagagtaacggagcca

SEQ ID NO: 4626 - DNA, 47 bp, Artificial Sequence; identical to SEQ ID NO: 1056
  Description of Artificial Sequence: Synthetic primer
  Description of Combined DNA/RNA Molecule: Synthetic primer

SEQ ID NO: 4627 - DNA, 41 bp, Artificial Sequence; identical to SEQ ID NO: 1065
  Description of Artificial Sequence: Synthetic primer
  Description of Combined DNA/RNA Molecule: Synthetic primer

SEQ ID NO: 4628 - DNA, 40 bp, Artificial Sequence; identical to SEQ ID NO: 1066
  Description of Artificial Sequence: Synthetic primer
  Description of Combined DNA/RNA Molecule: Synthetic primer

SEQ ID NO: 4629 - DNA, 52 bp, Artificial Sequence; identical to SEQ ID NO: 1067
  Description of Artificial Sequence: Synthetic primer
  Description of Combined DNA/RNA Molecule: Synthetic primer

SEQ ID NO: 4630 - DNA, 47 bp, Artificial Sequence; identical to SEQ ID NO: 1068
  Description of Artificial Sequence: Synthetic oligonucleotide
  Description of Combined DNA/RNA Molecule: Synthetic oligonucleotide

SEQ ID NO: 4631 - DNA, 51 bp, Artificial Sequence; identical to SEQ ID NO: 1069
  Description of Artificial Sequence: Synthetic oligonucleotide

SEQ ID NO: 4632 - DNA, 27 bp, Artificial Sequence
  Description of Artificial Sequence: Synthetic probe
ttcccatcacactgacaggcatcagct

SEQ ID NO: 4633 - DNA, 22 bp, Artificial Sequence
  Description of Artificial Sequence: Synthetic primer
tagcgatagtaccgacagtcac

SEQ ID NO: 4634 - DNA, 20 bp, Artificial Sequence
  Description of Artificial Sequence: Synthetic primer
tcgacgataggtttccgcac

SEQ ID NO: 4635 - DNA, 52 bp, Artificial Sequence; identical to SEQ ID NO: 1073
  Description of Artificial Sequence: Synthetic primer
  Description of Combined DNA/RNA Molecule: Synthetic primer

SEQ ID NO: 4636 - DNA, 44 bp, Artificial Sequence; identical to SEQ ID NO: 1074
  Description of Artificial Sequence: Synthetic primer
  Description of Combined DNA/RNA Molecule: Synthetic primer

SEQ ID NO: 4637 - DNA, 45 bp, Artificial Sequence; identical to SEQ ID NO: 1075
  Description of Artificial Sequence: Synthetic primer
  Description of Combined DNA/RNA Molecule: Synthetic primer

SEQ ID NO: 4638 - DNA, 49 bp, Artificial Sequence; identical to SEQ ID NO: 1076
  Description of Artificial Sequence: Synthetic primer
  Description of Combined DNA/RNA Molecule: Synthetic primer

SEQ ID NO: 4639 - DNA, 44 bp, Artificial Sequence; identical to SEQ ID NO: 1077
  Description of Artificial Sequence: Synthetic oligonucleotide
  Description of Combined DNA/RNA Molecule: Synthetic oligonucleotide

SEQ ID NO: 4640 - DNA, 42 bp, Artificial Sequence; identical to SEQ ID NO: 1078
  Description of Artificial Sequence: Synthetic oligonucleotide

SEQ ID NO: 4641 - DNA, 19 bp, Artificial Sequence
  Description of Artificial Sequence: Synthetic probe
ttgggcgcaggtgggcaca

SEQ ID NO: 4642 - DNA, 19 bp, Artificial Sequence
  Description of Artificial Sequence: Synthetic primer
tccagggtatttggcgcac

SEQ ID NO: 4643 - DNA, 20 bp, Artificial Sequence
  Description of Artificial Sequence: Synthetic primer
tcgacgataggtttccgcac

SEQ ID NO: 4644 - DNA, 44 bp, Artificial Sequence; identical to SEQ ID NO: 1082
  Description of Artificial Sequence: Synthetic primer
  Description of Combined DNA/RNA Molecule: Synthetic primer

SEQ ID NO: 4645 - DNA, 44 bp, Artificial Sequence; identical to SEQ ID NO: 1083
  Description of Artificial Sequence: Synthetic primer
  Description of Combined DNA/RNA Molecule: Synthetic primer

SEQ ID NO: 4646 - DNA, 42 bp, Artificial Sequence; identical to SEQ ID NO: 1084
  Description of Artificial Sequence: Synthetic primer
  Description of Combined DNA/RNA Molecule: Synthetic primer

SEQ ID NO: 4647 - DNA, 50 bp, Artificial Sequence; identical to SEQ ID NO: 1085
  Description of Artificial Sequence: Synthetic primer
  Description of Combined DNA/RNA Molecule: Synthetic primer

SEQ ID NO: 4648 - DNA, 44 bp, Artificial Sequence; identical to SEQ ID NO: 1086
  Description of Artificial Sequence: Synthetic oligonucleotide
  Description of Combined DNA/RNA Molecule: Synthetic oligonucleotide

SEQ ID NO: 4649 - DNA, 42 bp, Artificial Sequence; identical to SEQ ID NO: 1087
  Description of Artificial Sequence: Synthetic oligonucleotide

SEQ ID NO: 4650 - DNA, 26 bp, Artificial Sequence
  Description of Artificial Sequence: Synthetic probe
ttaccctcactagagggaccccacag

SEQ ID NO: 4651 - DNA, 21 bp, Artificial Sequence
  Description of Artificial Sequence: Synthetic primer
tccctcgtcatctcccttacc

SEQ ID NO: 4652 - DNA, 19 bp, Artificial Sequence
  Description of Artificial Sequence: Synthetic primer
tcgctccatcaccaagacc

SEQ ID NO: 4653 - DNA, 46 bp, Artificial Sequence; identical to SEQ ID NO: 1091
  Description of Artificial Sequence: Synthetic primer
  Description of Combined DNA/RNA Molecule: Synthetic primer

SEQ ID NO: 4654 - DNA, 39 bp, Artificial Sequence; identical to SEQ ID NO: 1092
  Description of Artificial Sequence: Synthetic primer
  Description of Combined DNA/RNA Molecule: Synthetic primer

SEQ ID NO: 4655 - DNA, 36 bp, Artificial Sequence; identical to SEQ ID NO: 1093
  Description of Artificial Sequence: Synthetic primer
  Description of Combined DNA/RNA Molecule: Synthetic primer

SEQ ID NO: 4656 - DNA, 54 bp, Artificial Sequence; identical to SEQ ID NO: 1094
  Description of Artificial Sequence: Synthetic primer
  Description of Combined DNA/RNA Molecule: Synthetic primer

SEQ ID NO: 4657 - DNA, 47 bp, Artificial Sequence; identical to SEQ ID NO: 1095
  Description of Artificial Sequence: Synthetic oligonucleotide
  Description of Combined DNA/RNA Molecule: Synthetic oligonucleotide

SEQ ID NO: 4658 - DNA, 54 bp, Artificial Sequence; identical to SEQ ID NO: 1096
  Description of Artificial Sequence: Synthetic oligonucleotide

SEQ ID NO: 4659 - DNA, 35 bp, Artificial Sequence; identical to SEQ ID NO: 1097
  Description of Artificial Sequence: Synthetic probe

SEQ ID NO: 4660 - DNA, 22 bp, Artificial Sequence
  Description of Artificial Sequence: Synthetic primer
tcataatgttgtcagcccgacc

SEQ ID NO: 4661 - DNA, 19 bp, Artificial Sequence
  Description of Artificial Sequence: Synthetic primer
tcgctccatcaccaagacc

SEQ ID NO: 4662 - DNA, 52 bp, Artificial Sequence; identical to SEQ ID NO: 1100
  Description of Artificial Sequence: Synthetic primer
  Description of Combined DNA/RNA Molecule: Synthetic primer

SEQ ID NO: 4663 - DNA, 37 bp, Artificial Sequence; identical to SEQ ID NO: 1401
  Description of Artificial Sequence: Synthetic primer
  Description of Combined DNA/RNA Molecule: Synthetic primer

SEQ ID NO: 4664 - DNA, 53 bp, Artificial Sequence; identical to SEQ ID NO: 1402
  Description of Artificial Sequence: Synthetic primer
  Description of Combined DNA/RNA Molecule: Synthetic primer

SEQ ID NO: 4665 - DNA, 55 bp, Artificial Sequence; identical to SEQ ID NO: 1403
  Description of Artificial Sequence: Synthetic oligonucleotide
  Description of Combined DNA/RNA Molecule: Synthetic oligonucleotide

SEQ ID NO: 4666 - DNA, 50 bp, Artificial Sequence; identical to SEQ ID NO: 1404
  Description of Artificial Sequence: Synthetic oligonucleotide

SEQ ID NO: 4667 - DNA, 26 bp, Artificial Sequence
  Description of Artificial Sequence: Synthetic probe
ttacacgcaggctcatgctctgagtt

SEQ ID NO: 4668 - DNA, 22 bp, Artificial Sequence
  Description of Artificial Sequence: Synthetic primer
tcctgagggacaaatacacacc

SEQ ID NO: 4669 - DNA, 21 bp, Artificial Sequence
  Description of Artificial Sequence: Synthetic primer
tgcgtgacttccttacctacc

SEQ ID NO: 4670 - DNA, 49 bp, Artificial Sequence; identical to SEQ ID NO: 1408
  Description of Artificial Sequence: Synthetic primer
  Description of Combined DNA/RNA Molecule: Synthetic primer

SEQ ID NO: 4671 - DNA, 41 bp, Artificial Sequence; identical to SEQ ID NO: 1409
  Description of Artificial Sequence: Synthetic primer
  Description of Combined DNA/RNA Molecule: Synthetic primer

SEQ ID NO: 4672 - DNA, 44 bp, Artificial Sequence; identical to SEQ ID NO: 1410
  Description of Artificial Sequence: Synthetic primer
  Description of Combined DNA/RNA Molecule: Synthetic primer

SEQ ID NO: 4673 - DNA, 50 bp, Artificial Sequence; identical to SEQ ID NO: 1411
  Description of Artificial Sequence: Synthetic primer
  Description of Combined DNA/RNA Molecule: Synthetic primer

SEQ ID NO: 4674 - DNA, 44 bp, Artificial Sequence; identical to SEQ ID NO: 1412
  Description of Artificial Sequence: Synthetic oligonucleotide
  Description of Combined DNA/RNA Molecule: Synthetic oligonucleotide

SEQ ID NO: 4675 - DNA, 47 bp, Artificial Sequence; identical to SEQ ID NO: 1413
  Description of Artificial Sequence: Synthetic oligonucleotide

SEQ ID NO: 4676 - DNA, 22 bp, Artificial Sequence
  Description of Artificial Sequence: Synthetic probe
ttgggttcagctggccagaggc

SEQ ID NO: 4677 - DNA, 19 bp, Artificial Sequence
  Description of Artificial Sequence: Synthetic primer
ttgcaacaggctaccgacc

SEQ ID NO: 4678 - DNA, 21 bp, Artificial Sequence
  Description of Artificial Sequence: Synthetic primer
tgcgtgacttccttacctacc

SEQ ID NO: 4679 - DNA, 46 bp, Artificial Sequence; identical to SEQ ID NO: 1417
  Description of Artificial Sequence: Synthetic primer
  Description of Combined DNA/RNA Molecule: Synthetic primer

SEQ ID NO: 4680 - DNA, 40 bp, Artificial Sequence; identical to SEQ ID NO: 1418
  Description of Artificial Sequence: Synthetic primer
  Description of Combined DNA/RNA Molecule: Synthetic primer

SEQ ID NO: 4681 - DNA, 38 bp, Artificial Sequence; identical to SEQ ID NO: 1419
  Description of Artificial Sequence: Synthetic primer
  Description of Combined DNA/RNA Molecule: Synthetic primer

SEQ ID NO: 4682 - DNA, 61 bp, Artificial Sequence; identical to SEQ ID NO: 1420
  Description of Artificial Sequence: Synthetic primer
  Description of Combined DNA/RNA Molecule: Synthetic primer

SEQ ID NO: 4683 - DNA, 50 bp, Artificial Sequence; identical to SEQ ID NO: 1421
  Description of Artificial Sequence: Synthetic oligonucleotide
  Description of Combined DNA/RNA Molecule: Synthetic oligonucleotide

SEQ ID NO: 4684 - DNA, 51 bp, Artificial Sequence; identical to SEQ ID NO: 1422
  Description of Artificial Sequence: Synthetic oligonucleotide

SEQ ID NO: 4685 - DNA, 30 bp, Artificial Sequence; identical to SEQ ID NO: 1423
  Description of Artificial Sequence: Synthetic probe

SEQ ID NO: 4686 - DNA, 22 bp, Artificial Sequence
  Description of Artificial Sequence: Synthetic primer
taagcctgcttttccgaaacaa

SEQ ID NO: 4687 - DNA, 21 bp, Artificial Sequence
  Description of Artificial Sequence: Synthetic primer
tgctatcctggcgcaatacaa

SEQ ID NO: 4688 - DNA, 64 bp, Artificial Sequence; identical to SEQ ID NO: 1426
  Description of Artificial Sequence: Synthetic primer
  Description of Combined DNA/RNA Molecule: Synthetic primer

SEQ ID NO: 4689 - DNA, 41 bp, Artificial Sequence; identical to SEQ ID NO: 1577
  Description of Artificial Sequence: Synthetic primer
  Description of Combined DNA/RNA Molecule: Synthetic primer

SEQ ID NO: 4690 - DNA, 39 bp, Artificial Sequence; identical to SEQ ID NO: 1578
  Description of Artificial Sequence: Synthetic primer
  Description of Combined DNA/RNA Molecule: Synthetic primer

SEQ ID NO: 4691 - DNA, 51 bp, Artificial Sequence; identical to SEQ ID NO: 1579
  Description of Artificial Sequence: Synthetic primer
  Description of Combined DNA/RNA Molecule: Synthetic primer

SEQ ID NO: 4692 - DNA, 45 bp, Artificial Sequence; identical to SEQ ID NO: 1580
  Description of Artificial Sequence: Synthetic oligonucleotide
  Description of Combined DNA/RNA Molecule: Synthetic oligonucleotide

SEQ ID NO: 4693 - DNA, 42 bp, Artificial Sequence; identical to SEQ ID NO: 1581
  Description of Artificial Sequence: Synthetic oligonucleotide

SEQ ID NO: 4694 - DNA, 24 bp, Artificial Sequence
  Description of Artificial Sequence: Synthetic probe
aatgcagcaccagatcagccccag

SEQ ID NO: 4695 - DNA, 19 bp, Artificial Sequence
  Description of Artificial Sequence: Synthetic primer
ttgctgtgcgcggtagaac

SEQ ID NO: 4696 - DNA, 20 bp, Artificial Sequence
  Description of Artificial Sequence: Synthetic primer
tggcaccagcttagcgtaac

SEQ ID NO: 4697 - DNA, 43 bp, Artificial Sequence; identical to SEQ ID NO: 1585
  Description of Artificial Sequence: Synthetic primer
  Description of Combined DNA/RNA Molecule: Synthetic primer

SEQ ID NO: 4698 - DNA, 39 bp, Artificial Sequence; identical to SEQ ID NO: 1604
  Description of Artificial Sequence: Synthetic primer
  Description of Combined DNA/RNA Molecule: Synthetic primer

SEQ ID NO: 4699 - DNA, 39 bp, Artificial Sequence; identical to SEQ ID NO: 1605
  Description of Artificial Sequence: Synthetic primer
  Description of Combined DNA/RNA Molecule: Synthetic primer

SEQ ID NO: 4700 - DNA, 48 bp, Artificial Sequence; identical to SEQ ID NO: 1606
  Description of Artificial Sequence: Synthetic primer
  Description of Combined DNA/RNA Molecule: Synthetic primer

SEQ ID NO: 4701 - DNA, 47 bp, Artificial Sequence; identical to SEQ ID NO: 1607
  Description of Artificial Sequence: Synthetic oligonucleotide
  Description of Combined DNA/RNA Molecule: Synthetic oligonucleotide

SEQ ID NO: 4702 - DNA, 46 bp, Artificial Sequence; identical to SEQ ID NO: 1608
  Description of Artificial Sequence: Synthetic oligonucleotide

SEQ ID NO: 4703 - DNA, 28 bp, Artificial Sequence
  Description of Artificial Sequence: Synthetic probe
aattcctcatccctccacacacaccctg

SEQ ID NO: 4704 - DNA, 21 bp, Artificial Sequence
  Description of Artificial Sequence: Synthetic primer
tcacagagacttgccgatcac

SEQ ID NO: 4705 - DNA, 22 bp, Artificial Sequence
  Description of Artificial Sequence: Synthetic primer
tggccatgtctaagctacacac

SEQ ID NO: 4706 - DNA, 46 bp, Artificial Sequence; identical to SEQ ID NO: 1612
  Description of Artificial Sequence: Synthetic primer
  Description of Combined DNA/RNA Molecule: Synthetic primer

SEQ ID NO: 4707 - DNA, 45 bp, Artificial Sequence; identical to SEQ ID NO: 1629
  Description of Artificial Sequence: Synthetic primer
  Description of Combined DNA/RNA Molecule: Synthetic primer

SEQ ID NO: 4708 - DNA, 41 bp, Artificial Sequence; identical to SEQ ID NO: 1630
  Description of Artificial Sequence: Synthetic primer
  Description of Combined DNA/RNA Molecule: Synthetic primer

SEQ ID NO: 4709 - DNA, 53 bp, Artificial Sequence; identical to SEQ ID NO: 1631
  Description of Artificial Sequence: Synthetic primer
  Description of Combined DNA/RNA Molecule: Synthetic primer

SEQ ID NO: 4710 - DNA, 53 bp, Artificial Sequence; identical to SEQ ID NO: 1632
  Description of Artificial Sequence: Synthetic oligonucleotide
  Description of Combined DNA/RNA Molecule: Synthetic oligonucleotide

SEQ ID NO: 4711 - DNA, 47 bp, Artificial Sequence; identical to SEQ ID NO: 1633
  Description of Artificial Sequence: Synthetic oligonucleotide

SEQ ID NO: 4712 - DNA, 21 bp, Artificial Sequence
  Description of Artificial Sequence: Synthetic probe
tttggcccaggctcacccctg

SEQ ID NO: 4713 - DNA, 22 bp, Artificial Sequence
  Description of Artificial Sequence: Synthetic primer
tgatgctggcaaaccctagaac

SEQ ID NO: 4714 - DNA, 20 bp, Artificial Sequence
  Description of Artificial Sequence: Synthetic primer
tggcctaacggtgatggaac

SEQ ID NO: 4715 - DNA, 51 bp, Artificial Sequence; identical to SEQ ID NO: 1637
  Description of Artificial Sequence: Synthetic primer
  Description of Combined DNA/RNA Molecule: Synthetic primer

SEQ ID NO: 4716 - DNA, 39 bp, Artificial Sequence; identical to SEQ ID NO: 1638
  Description of Artificial Sequence: Synthetic primer
  Description of Combined DNA/RNA Molecule: Synthetic primer

SEQ ID NO: 4717 - DNA, 37 bp, Artificial Sequence; identical to SEQ ID NO: 1639
  Description of Artificial Sequence: Synthetic primer
  Description of Combined DNA/RNA Molecule: Synthetic primer

SEQ ID NO: 4718 - DNA, 54 bp, Artificial Sequence; identical to SEQ ID NO: 1640
  Description of Artificial Sequence: Synthetic primer
  Description of Combined DNA/RNA Molecule: Synthetic primer

SEQ ID NO: 4719 - DNA, 42 bp, Artificial Sequence; identical to SEQ ID NO: 1641
  Description of Artificial Sequence: Synthetic oligonucleotide
  Description of Combined DNA/RNA Molecule: Synthetic oligonucleotide

SEQ ID NO: 4720 - DNA, 47 bp, Artificial Sequence; identical to SEQ ID NO: 1642
  Description of Artificial Sequence: Synthetic oligonucleotide

SEQ ID NO: 4721 - DNA, 29 bp, Artificial Sequence
  Description of Artificial Sequence: Synthetic probe
ttgctgacaaacagcagggttgtggttga

SEQ ID NO: 4722 - DNA, 19 bp, Artificial Sequence
  Description of Artificial Sequence: Synthetic primer
ttttcggcatccgcttcca

SEQ ID NO: 4723 - DNA, 21 bp, Artificial Sequence
  Description of Artificial Sequence: Synthetic primer
tggcctgtcctctgttaacca

SEQ ID NO: 4724 - DNA, 48 bp, Artificial Sequence; identical to SEQ ID NO: 1646
  Description of Artificial Sequence: Synthetic primer
  Description of Combined DNA/RNA Molecule: Synthetic primer

SEQ ID NO: 4725 - DNA, 42 bp, Artificial Sequence; identical to SEQ ID NO: 1862
  Description of Artificial Sequence: Synthetic primer
  Description of Combined DNA/RNA Molecule: Synthetic primer

SEQ ID NO: 4726 - DNA, 43 bp, Artificial Sequence; identical to SEQ ID NO: 1863
  Description of Artificial Sequence: Synthetic primer
  Description of Combined DNA/RNA Molecule: Synthetic primer

SEQ ID NO: 4727 - DNA, 52 bp, Artificial Sequence; identical to SEQ ID NO: 1864
  Description of Artificial Sequence: Synthetic primer
  Description of Combined DNA/RNA Molecule: Synthetic primer

SEQ ID NO: 4728 - DNA, 45 bp, Artificial Sequence; identical to SEQ ID NO: 1865
  Description of Artificial Sequence: Synthetic oligonucleotide
  Description of Combined DNA/RNA Molecule: Synthetic oligonucleotide

SEQ ID NO: 4729 - DNA, 51 bp, Artificial Sequence; identical to SEQ ID NO: 1866
  Description of Artificial Sequence: Synthetic oligonucleotide

SEQ ID NO: 4730 - DNA, 29 bp, Artificial Sequence
  Description of Artificial Sequence: Synthetic probe
ttccactcagccctgcatttgtctgaagc

SEQ ID NO: 4731 - DNA, 20 bp, Artificial Sequence
  Description of Artificial Sequence: Synthetic primer
tttttacgcacagcaccacc

SEQ ID NO: 4732 - DNA, 22 bp, Artificial Sequence
  Description of Artificial Sequence: Synthetic primer
tgtctaagccgcctatgtaacc

SEQ ID NO: 4733 - DNA, 51 bp, Artificial Sequence; identical to SEQ ID NO: 1870
  Description of Artificial Sequence: Synthetic primer
  Description of Combined DNA/RNA Molecule: Synthetic primer

SEQ ID NO: 4734 - DNA, 43 bp, Artificial Sequence; identical to SEQ ID NO: 1871
  Description of Artificial Sequence: Synthetic primer
  Description of Combined DNA/RNA Molecule: Synthetic primer

SEQ ID NO: 4735 - DNA, 45 bp, Artificial Sequence; identical to SEQ ID NO: 1872
  Description of Artificial Sequence: Synthetic primer
  Description of Combined DNA/RNA Molecule: Synthetic primer

SEQ ID NO: 4736 - DNA, 58 bp, Artificial Sequence; identical to SEQ ID NO: 1873
  Description of Artificial Sequence: Synthetic primer
  Description of Combined DNA/RNA Molecule: Synthetic primer

SEQ ID NO: 4737 - DNA, 48 bp, Artificial Sequence; identical to SEQ ID NO: 1874
  Description of Artificial Sequence: Synthetic oligonucleotide
  Description of Combined DNA/RNA Molecule: Synthetic oligonucleotide

SEQ ID NO: 4738 - DNA, 44 bp, Artificial Sequence; identical to SEQ ID NO: 1875
  Description of Artificial Sequence: Synthetic oligonucleotide

SEQ ID NO: 4739 - DNA, 21 bp, Artificial Sequence
  Description of Artificial Sequence: Synthetic probe
ttacctgcacctgccacctgg

SEQ ID NO: 4740 - DNA, 22 bp, Artificial Sequence
  Description of Artificial Sequence: Synthetic primer
tggacacttcgcccttcttaac

SEQ ID NO: 4741 - DNA, 21 bp, Artificial Sequence
  Description of Artificial Sequence: Synthetic primer
tgtgatgcccagatcccaaac

SEQ ID NO: 4742 - DNA, 46 bp, Artificial Sequence; identical to SEQ ID NO: 1879
  Description of Artificial Sequence: Synthetic primer
  Description of Combined DNA/RNA Molecule: Synthetic primer

SEQ ID NO: 4743 - DNA, 39 bp, Artificial Sequence; identical to SEQ ID NO: 1880
  Description of Artificial Sequence: Synthetic primer
  Description of Combined DNA/RNA Molecule: Synthetic primer

SEQ ID NO: 4744 - DNA, 40 bp, Artificial Sequence; identical to SEQ ID NO: 1881
  Description of Artificial Sequence: Synthetic primer
  Description of Combined DNA/RNA Molecule: Synthetic primer

SEQ ID NO: 4745 - DNA, 48 bp, Artificial Sequence; identical to SEQ ID NO: 1882
  Description of Artificial Sequence: Synthetic primer
  Description of Combined DNA/RNA Molecule: Synthetic primer

SEQ ID NO: 4746 - DNA, 44 bp, Artificial Sequence; identical to SEQ ID NO: 1883
  Description of Artificial Sequence: Synthetic oligonucleotide
  Description of Combined DNA/RNA Molecule: Synthetic oligonucleotide

SEQ ID NO: 4747 - DNA, 45 bp, Artificial Sequence; identical to SEQ ID NO: 1884
  Description of Artificial Sequence: Synthetic oligonucleotide

SEQ ID NO: 4748 - DNA, 22 bp, Artificial Sequence
  Description of Artificial Sequence: Synthetic probe
ttcagcgcagccacaccacagc

SEQ ID NO: 4749 - DNA, 21 bp, Artificial Sequence
  Description of Artificial Sequence: Synthetic primer
tggaggccggagaaattaaac

SEQ ID NO: 4750 - DNA, 21 bp, Artificial Sequence
  Description of Artificial Sequence: Synthetic primer
tgtgatgcccagatcccaaac

SEQ ID NO: 4751 - DNA, 51 bp, Artificial Sequence; identical to SEQ ID NO: 1888
  Description of Artificial Sequence: Synthetic primer
  Description of Combined DNA/RNA Molecule: Synthetic primer

SEQ ID NO: 4752 - DNA, 45 bp, Artificial Sequence; identical to SEQ ID NO: 1889
  Description of Artificial Sequence: Synthetic primer
  Description of Combined DNA/RNA Molecule: Synthetic primer

SEQ ID NO: 4753 - DNA, 44 bp, Artificial Sequence; identical to SEQ ID NO: 1890
  Description of Artificial Sequence: Synthetic primer
  Description of Combined DNA/RNA Molecule: Synthetic primer

SEQ ID NO: 4754 - DNA, 52 bp, Artificial Sequence; identical to SEQ ID NO: 1891
  Description of Artificial Sequence: Synthetic primer
  Description of Combined DNA/RNA Molecule: Synthetic primer

SEQ ID NO: 4755 - DNA, 62 bp, Artificial Sequence; identical to SEQ ID NO: 1892
  Description of Artificial Sequence: Synthetic oligonucleotide
  Description of Combined DNA/RNA Molecule: Synthetic oligonucleotide

SEQ ID NO: 4756 - DNA, 43 bp, Artificial Sequence; identical to SEQ ID NO: 1893
  Description of Artificial Sequence: Synthetic oligonucleotide

SEQ ID NO: 4757 - DNA, 23 bp, Artificial Sequence
  Description of Artificial Sequence: Synthetic probe
ttactcgcagggaggaggctcag

SEQ ID NO: 4758 - DNA, 20 bp, Artificial Sequence
  Description of Artificial Sequence: Synthetic primer
ttgtctctgcgacccatcaa

SEQ ID NO: 4759 - DNA, 19 bp, Artificial Sequence
  Description of Artificial Sequence: Synthetic primer
tgtgccgaacgtgtaccaa

SEQ ID NO: 4760 - DNA, 41 bp, Artificial Sequence; identical to SEQ ID NO: 1897
  Description of Artificial Sequence: Synthetic primer
  Description of Combined DNA/RNA Molecule: Synthetic primer

SEQ ID NO: 4761 - DNA, 40 bp, Artificial Sequence; identical to SEQ ID NO: 1898
  Description of Artificial Sequence: Synthetic primer
  Description of Combined DNA/RNA Molecule: Synthetic primer

SEQ ID NO: 4762 - DNA, 39 bp, Artificial Sequence; identical to SEQ ID NO: 1899
  Description of Artificial Sequence: Synthetic primer
  Description of Combined DNA/RNA Molecule: Synthetic primer

SEQ ID NO: 4763 - DNA, 49 bp, Artificial Sequence; identical to SEQ ID NO: 1900
  Description of Artificial Sequence: Synthetic primer
  Description of Combined DNA/RNA Molecule: Synthetic primer

SEQ ID NO: 4764 - DNA, 44 bp, Artificial Sequence; identical to SEQ ID NO: 1901
  Description of Artificial Sequence: Synthetic oligonucleotide
  Description of Combined DNA/RNA Molecule: Synthetic oligonucleotide

SEQ ID NO: 4765 - DNA, 45 bp, Artificial Sequence; identical to SEQ ID NO: 1902
  Description of Artificial Sequence: Synthetic oligonucleotide

SEQ ID NO: 4766 - DNA, 26 bp, Artificial Sequence
  Description of Artificial Sequence: Synthetic probe
ttctggacaagtgacagccccagctc

SEQ ID NO: 4767 - DNA, 22 bp, Artificial Sequence
  Description of Artificial Sequence: Synthetic primer
tggataaactaagtccgcccac

SEQ ID NO: 4768 - DNA, 21 bp, Artificial Sequence
  Description of Artificial Sequence: Synthetic primer
tgttagacgtcgctcagtcac

SEQ ID NO: 4769 - DNA, 46 bp, Artificial Sequence; identical to SEQ ID NO: 1906
  Description of Artificial Sequence: Synthetic primer
  Description of Combined DNA/RNA Molecule: Synthetic primer

SEQ ID NO: 4770 - DNA, 39 bp, Artificial Sequence; identical to SEQ ID NO: 1960
  Description of Artificial Sequence: Synthetic primer
  Description of Combined DNA/RNA Molecule: Synthetic primer

SEQ ID NO: 4771 - DNA, 39 bp, Artificial Sequence; identical to SEQ ID NO: 1961
  Description of Artificial Sequence: Synthetic primer
  Description of Combined DNA/RNA Molecule: Synthetic primer

SEQ ID NO: 4772 - DNA, 51 bp, Artificial Sequence; identical to SEQ ID NO: 1962
  Description of Artificial Sequence: Synthetic primer
  Description of Combined DNA/RNA Molecule: Synthetic primer

SEQ ID NO: 4773 - DNA, 45 bp, Artificial Sequence; identical to SEQ ID NO: 1963
  Description of Artificial Sequence: Synthetic oligonucleotide
  Description of Combined DNA/RNA Molecule: Synthetic oligonucleotide

SEQ ID NO: 4774 - DNA, 48 bp, Artificial Sequence; identical to SEQ ID NO: 1964
  Description of Artificial Sequence: Synthetic oligonucleotide

SEQ ID NO: 4775 - DNA, 27 bp, Artificial Sequence
  Description of Artificial Sequence: Synthetic probe
ttccagacactgccttcacacacaccc

SEQ ID NO: 4776 - DNA, 19 bp, Artificial Sequence
  Description of Artificial Sequence: Synthetic primer
tcgcaacgtgccgaataca

SEQ ID NO: 4777 - DNA, 19 bp, Artificial Sequence
  Description of Artificial Sequence: Synthetic primer
ttagctcgaccgtgcaaca

SEQ ID NO: 4778 - DNA, 44 bp, Artificial Sequence; identical to SEQ ID NO: 1968
  Description of Artificial Sequence: Synthetic primer
  Description of Combined DNA/RNA Molecule: Synthetic primer

SEQ ID NO: 4779 - DNA, 46 bp, Artificial Sequence; identical to SEQ ID NO: 1969
  Description of Artificial Sequence: Synthetic primer
  Description of Combined DNA/RNA Molecule: Synthetic primer

SEQ ID NO: 4780 - DNA, 46 bp, Artificial Sequence; identical to SEQ ID NO: 1970
  Description of Artificial Sequence: Synthetic primer
  Description of Combined DNA/RNA Molecule: Synthetic primer

SEQ ID NO: 4781 - DNA, 49 bp, Artificial Sequence; identical to SEQ ID NO: 1971
  Description of Artificial Sequence: Synthetic primer
  Description of Combined DNA/RNA Molecule: Synthetic primer

SEQ ID NO: 4782 - DNA, 46 bp, Artificial Sequence; identical to SEQ ID NO: 1972
  Description of Artificial Sequence: Synthetic oligonucleotide
  Description of Combined DNA/RNA Molecule: Synthetic oligonucleotide

SEQ ID NO: 4783 - DNA, 52 bp, Artificial Sequence; identical to SEQ ID NO: 1973
  Description of Artificial Sequence: Synthetic oligonucleotide

SEQ ID NO: 4784 - DNA, 34 bp, Artificial Sequence; identical to SEQ ID NO: 1974
  Description of Artificial Sequence: Synthetic probe

SEQ ID NO: 4785 - DNA, 21 bp, Artificial Sequence
  Description of Artificial Sequence: Synthetic primer
taacgggattgagagtggaca

SEQ ID NO: 4786 - DNA, 19 bp, Artificial Sequence
  Description of Artificial Sequence: Synthetic primer
ttagtaagggcggcagaca

SEQ ID NO: 4787 - DNA, 43 bp, Artificial Sequence; identical to SEQ ID NO: 1977
  Description of Artificial Sequence: Synthetic primer
  Description of Combined DNA/RNA Molecule: Synthetic primer

SEQ ID NO: 4788 - DNA, 43 bp, Artificial Sequence; identical to SEQ ID NO: 1978
  Description of Artificial Sequence: Synthetic primer
  Description of Combined DNA/RNA Molecule: Synthetic primer

SEQ ID NO: 4789 - DNA, 45 bp, Artificial Sequence; identical to SEQ ID NO: 1979
  Description of Artificial Sequence: Synthetic primer
  Description of Combined DNA/RNA Molecule: Synthetic primer

SEQ ID NO: 4790 - DNA, 55 bp, Artificial Sequence; identical to SEQ ID NO: 1980
  Description of Artificial Sequence: Synthetic primer
  Description of Combined DNA/RNA Molecule: Synthetic primer

SEQ ID NO: 4791 - DNA, 46 bp, Artificial Sequence; identical to SEQ ID NO: 1981
  Description of Artificial Sequence: Synthetic oligonucleotide
  Description of Combined DNA/RNA Molecule: Synthetic oligonucleotide

SEQ ID NO: 4792 - DNA, 55 bp, Artificial Sequence; identical to SEQ ID NO: 1982
  Description of Artificial Sequence: Synthetic oligonucleotide

SEQ ID NO: 4793 - DNA, 33 bp, Artificial Sequence; identical to SEQ ID NO: 1983
  Description of Artificial Sequence: Synthetic probe

SEQ ID NO: 4794 - DNA, 21 bp, Artificial Sequence
  Description of Artificial Sequence: Synthetic primer
taacgggattgagagtggaca

SEQ ID NO: 4795 - DNA, 19 bp, Artificial Sequence
  Description of Artificial Sequence: Synthetic primer
ttagtaagggcggcagaca

SEQ ID NO: 4796 - DNA, 48 bp, Artificial Sequence
  Description of Artificial Sequence: Synthetic primer
  Description of Combined DNA/RNA Molecule: Synthetic primer
acgacgacgacgaactctattaagggctgtttcctgtaaggcagagac

SEQ ID NO: 4797 - DNA, 46 bp, Artificial Sequence
  Description of Artificial Sequence: Synthetic primer
  Description of Combined DNA/RNA Molecule: Synthetic primer
acgacgacgacgaataagggctgtttcctgtaaggcagagauaaag

SEQ ID NO: 4798 - DNA, 51 bp, Artificial Sequence
  Description of Artificial Sequence: Synthetic primer
  Description of Combined DNA/RNA Molecule: Synthetic primer
acgacgacgacttgacgaacataatggatggccttgcttgaggtgcaatag

SEQ ID NO: 4799 - DNA, 56 bp, Artificial Sequence
  Description of Artificial Sequence: Synthetic oligonucleotide
  Description of Combined DNA/RNA Molecule: Synthetic oligonucleotide
tcacagagacttgccgatcacccaataagcacagtttacttcttaggcgcaagcgc

SEQ ID NO: 4800 - DNA, 55 bp, Artificial Sequence
  Description of Artificial Sequence: Synthetic oligonucleotide
agcatcaatctcagccacccatccttcctttaggtgtgtagcttagacatggcca

SEQ ID NO: 4801 - DNA, 26 bp, Artificial Sequence
  Description of Artificial Sequence: Synthetic probe
aaaggcgcaagcatcaatctcagcca

SEQ ID NO: 4802 - DNA, 21 bp, Artificial Sequence
  Description of Artificial Sequence: Synthetic primer
tcacagagacttgccgatcac

SEQ ID NO: 4803 - DNA, 22 bp, Artificial Sequence
  Description of Artificial Sequence: Synthetic primer
tggccatgtctaagctacacac

SEQ ID NO: 4804 - DNA, 43 bp, Artificial Sequence
  Description of Artificial Sequence: Synthetic primer
  Description of Combined DNA/RNA Molecule: Synthetic primer
acgacgacgacgaacaccatttactcaggaggtgcccaagaat

SEQ ID NO: 4805 - DNA, 45 bp, Artificial Sequence
  Description of Artificial Sequence: Synthetic primer
  Description of Combined DNA/RNA Molecule: Synthetic primer
acgacgacgacgaaccatttactcaggaggtgcccaagaaccaga

SEQ ID NO: 4806 - DNA, 58 bp, Artificial Sequence
  Description of Artificial Sequence: Synthetic primer
  Description of Combined DNA/RNA Molecule: Synthetic primer
acgacgacgacttgacgaacataatgacatgaaagaagctgagtgtgaaaggcugcct

SEQ ID NO: 4807 - DNA, 53 bp, Artificial Sequence
  Description of Artificial Sequence: Synthetic oligonucleotide
  Description of Combined DNA/RNA Molecule: Synthetic oligonucleotide
ttcgtccctgcacgctaactgaggcaatctcacattttaagcaaggcacccgt

SEQ ID NO: 4808 - DNA, 50 bp, Artificial Sequence
  Description of Artificial Sequence: Synthetic oligonucleotide
cccactgccttaccaaaatagccctctccagttccatcaccgttaggcca

SEQ ID NO: 4809 - DNA, 31 bp, Artificial Sequence
  Description of Artificial Sequence: Synthetic probe
ttcaaggcacccactgccttaccaaaatagc

SEQ ID NO: 4810 - DNA, 19 bp, Artificial Sequence
  Description of Artificial Sequence: Synthetic primer
ttcgtccctgcacgctaac

SEQ ID NO: 4811 - DNA, 20 bp, Artificial Sequence
  Description of Artificial Sequence: Synthetic primer
tggcctaacggtgatggaac

SEQ ID NO: 4812 - DNA, 47 bp, Artificial Sequence
  Description of Artificial Sequence: Synthetic primer
  Description of Combined DNA/RNA Molecule: Synthetic primer
tggcctaacggtgatggaacgaaaggctgcccctcctttgatggagg

SEQ ID NO: 4813 - DNA, 41 bp, Artificial Sequence
  Description of Artificial Sequence: Synthetic primer
  Description of Combined DNA/RNA Molecule: Synthetic primer
acgacgacgacgaactcctcccaggctgggatcacagtcct

SEQ ID NO: 4814 - DNA, 40 bp, Artificial Sequence
  Description of Artificial Sequence: Synthetic primer
  Description of Combined DNA/RNA Molecule: Synthetic primer
acgacgacgacgaaaaaagacccctcctcccaggcuggaa

SEQ ID NO: 4815 - DNA, 50 bp, Artificial Sequence
  Description of Artificial Sequence: Synthetic primer
  Description of Combined DNA/RNA Molecule: Synthetic primer
acgacgacgacttgacgaacataatcctgatgccagcctgaggtacgtta

SEQ ID NO: 4816 - DNA, 57 bp, Artificial Sequence
  Description of Artificial Sequence: Synthetic oligonucleotide
  Description of Combined DNA/RNA Molecule: Synthetic oligonucleotide
tgatgctggcaaaccctagaacgtcccagtagagagggtgctcagataatcaacaat

SEQ ID NO: 4817 - DNA, 51 bp, Artificial Sequence
  Description of Artificial Sequence: Synthetic oligonucleotide
acagcatttctcccaccctcatcactgtccagttccatcaccgttaggcca

SEQ ID NO: 4818 - DNA, 32 bp, Artificial Sequence
  Description of Artificial Sequence: Synthetic probe
ttataatcaacagcatttctcccaccctcatc

SEQ ID NO: 4819 - DNA, 22 bp, Artificial Sequence
  Description of Artificial Sequence: Synthetic primer
tgatgctggcaaaccctagaac

SEQ ID NO: 4820 - DNA, 20 bp, Artificial Sequence
  Description of Artificial Sequence: Synthetic primer
tggcctaacggtgatggaac

SEQ ID NO: 4821 - DNA, 48 bp, Artificial Sequence
  Description of Artificial Sequence: Synthetic primer
  Description of Combined DNA/RNA Molecule: Synthetic primer
tggcctaacggtgatggaacctgatgccagcctgaggtaagctggacg

SEQ ID NO: 4822 - DNA, 47 bp, Artificial Sequence
  Description of Artificial Sequence: Synthetic primer
  Description of Combined DNA/RNA Molecule: Synthetic primer
acgacgacgacgaacatgtcagtcactcatctctctcctccaagcta

SEQ ID NO: 4823 - DNA, 50 bp, Artificial Sequence
  Description of Artificial Sequence: Synthetic primer
  Description of Combined DNA/RNA Molecule: Synthetic primer
acgacgacgacgaaattgtacatgcatgtcagtcactcatctctcucctt

SEQ ID NO: 4824 - DNA, 52 bp, Artificial Sequence
  Description of Artificial Sequence: Synthetic primer
  Description of Combined DNA/RNA Molecule: Synthetic primer
acgacgacgacttgacgaacataatccctgcagtgggtgtacttggtctgcg

SEQ ID NO: 4825 - DNA, 49 bp, Artificial Sequence
  Description of Artificial Sequence: Synthetic oligonucleotide
  Description of Combined DNA/RNA Molecule: Synthetic oligonucleotide
tgatgctggcaaaccctagaactcctgccacagcttttccatcacccga

SEQ ID NO: 4826 - DNA, 51 bp, Artificial Sequence
  Description of Artificial Sequence: Synthetic oligonucleotide
cccagatgtagtccccccacaccaagtacacgttccatcaccgttaggcca

SEQ ID NO: 4827 - DNA, 27 bp, Artificial Sequence
  Description of Artificial Sequence: Synthetic probe
aatccatcacccagatgtagtcccccc

SEQ ID NO: 4828 - DNA, 22 bp, Artificial Sequence
  Description of Artificial Sequence: Synthetic primer
tgatgctggcaaaccctagaac

SEQ ID NO: 4829 - DNA, 20 bp, Artificial Sequence
  Description of Artificial Sequence: Synthetic primer
tggcctaacggtgatggaac

SEQ ID NO: 4830 - DNA, 47 bp, Artificial Sequence
  Description of Artificial Sequence: Synthetic primer
  Description of Combined DNA/RNA Molecule: Synthetic primer
tggcctaacggtgatggaacccctgcagtgggtgtacttgctggacg

SEQ ID NO: 4831 - DNA, 41 bp, Artificial Sequence
  Description of Artificial Sequence: Synthetic primer
  Description of Combined DNA/RNA Molecule: Synthetic primer
acgacgacgacgaagcaggtaggcatcactggtgcacactc

SEQ ID NO: 4832 - DNA, 42 bp, Artificial Sequence
  Description of Artificial Sequence: Synthetic primer
  Description of Combined DNA/RNA Molecule: Synthetic primer
acgacgacgacgaaaggtaggcatcactggtgcacacutggt

SEQ ID NO: 4833 - DNA, 51 bp, Artificial Sequence
  Description of Artificial Sequence: Synthetic primer
  Description of Combined DNA/RNA Molecule: Synthetic primer
acgacgacgacttgacgaacataatctggtggagggtctcctggtcctgct

SEQ ID NO: 4834 - DNA, 47 bp, Artificial Sequence
  Description of Artificial Sequence: Synthetic oligonucleotide
  Description of Combined DNA/RNA Molecule: Synthetic oligonucleotide
ttttcggcatccgcttccagaggacatgggagtgacactacagagga

SEQ ID NO: 4835 - DNA, 48 bp, Artificial Sequence
  Description of Artificial Sequence: Synthetic oligonucleotide
gagagagcagggagtcagcccagagcatggttaacagaggacaggcca

SEQ ID NO: 4836 - DNA, 29 bp, Artificial Sequence
  Description of Artificial Sequence: Synthetic probe
ttcactacagagagagcagggagtcagcc

SEQ ID NO: 4837 - DNA, 19 bp, Artificial Sequence
  Description of Artificial Sequence: Synthetic primer
ttttcggcatccgcttcca

SEQ ID NO: 4838 - DNA, 21 bp, Artificial Sequence
  Description of Artificial Sequence: Synthetic primer
tggcctgtcctctgttaacca

SEQ ID NO: 4839 - DNA, 46 bp, Artificial Sequence
  Description of Artificial Sequence: Synthetic primer
  Description of Combined DNA/RNA Molecule: Synthetic primer
tggcctgtcctctgttaaccactcctggtcctgcctgctttgggcc

SEQ ID NO: 4840 - DNA, 41 bp, Artificial Sequence
  Description of Artificial Sequence: Synthetic primer
  Description of Combined DNA/RNA Molecule: Synthetic primer
acgacgacgacgaagccagcacacttttccaagccaccttg

SEQ ID NO: 4841 - DNA, 42 bp, Artificial Sequence
  Description of Artificial Sequence: Synthetic primer
  Description of Combined DNA/RNA Molecule: Synthetic primer
acgacgacgacgaacagtggccagcacacttttccaagccat

SEQ ID NO: 4842 - DNA, 53 bp, Artificial Sequence
  Description of Artificial Sequence: Synthetic primer
  Description of Combined DNA/RNA Molecule: Synthetic primer
acgacgacgacttgacgaacataatggtagtctgagatggcctgcaccaagcg

SEQ ID NO: 4843 - DNA, 47 bp, Artificial Sequence
  Description of Artificial Sequence: Synthetic oligonucleotide
  Description of Combined DNA/RNA Molecule: Synthetic oligonucleotide
tccgggtatacactgtcccattagtggccagctgcttgcgcagcatc

SEQ ID NO: 4844 - DNA, 49 bp, Artificial Sequence
  Description of Artificial Sequence: Synthetic oligonucleotide
gcactttgccaccagtggacttgcatgctggttaacagaggacaggcca

SEQ ID NO: 4845 - DNA, 22 bp, Artificial Sequence
  Description of Artificial Sequence: Synthetic probe
ttttgcgcagcactttgccacc

SEQ ID NO: 4846 - DNA, 20 bp, Artificial Sequence
  Description of Artificial Sequence: Synthetic primer
tccgggtatacactgtccca

SEQ ID NO: 4847 - DNA, 21 bp, Artificial Sequence
  Description of Artificial Sequence: Synthetic primer
tggcctgtcctctgttaacca

SEQ ID NO: 4848 - DNA, 47 bp, Artificial Sequence
  Description of Artificial Sequence: Synthetic primer
  Description of Combined DNA/RNA Molecule: Synthetic primer
tggcctgtcctctgttaaccacctgcaccaagcagactgcgtgcaaa

SEQ ID NO: 4849 - DNA, 43 bp, Artificial Sequence
  Description of Artificial Sequence: Synthetic primer
  Description of Combined DNA/RNA Molecule: Synthetic primer
acgacgacgacgaaggcaacagtaccaggcctgtagcagtgga

SEQ ID NO: 4850 - DNA, 46 bp, Artificial Sequence
  Description of Artificial Sequence: Synthetic primer
  Description of Combined DNA/RNA Molecule: Synthetic primer
acgacgacgacgaagcagatttcacagagggcaacagtaccaggct

SEQ ID NO: 4851 - DNA, 54 bp, Artificial Sequence
  Description of Artificial Sequence: Synthetic primer
  Description of Combined DNA/RNA Molecule: Synthetic primer
acgacgacgacttgacgaacataatagcttgtaagtccactggtggcaaagcct

SEQ ID NO: 4852 - DNA, 45 bp, Artificial Sequence
  Description of Artificial Sequence: Synthetic oligonucleotide
  Description of Combined DNA/RNA Molecule: Synthetic oligonucleotide
tgcgactctattcacgtccaaacaccaccagtggctgacacaccc

SEQ ID NO: 4853 - DNA, 50 bp, Artificial Sequence
  Description of Artificial Sequence: Synthetic oligonucleotide
cacttttgcaagccaccttagtggccagcttgctatttggtgtaccgcca

SEQ ID NO: 4854 - DNA, 32 bp, Artificial Sequence
  Description of Artificial Sequence: Synthetic probe
aagctgacacacttttgcaagccaccttagtg

SEQ ID NO: 4855 - DNA, 21 bp, Artificial Sequence
  Description of Artificial Sequence: Synthetic primer
tgcgactctattcacgtccaa

SEQ ID NO: 4856 - DNA, 21 bp, Artificial Sequence
  Description of Artificial Sequence: Synthetic primer
tggcggtacaccaaatagcaa

SEQ ID NO: 4857 - DNA, 46 bp, Artificial Sequence
  Description of Artificial Sequence: Synthetic primer
  Description of Combined DNA/RNA Molecule: Synthetic primer
tggcggtacaccaaatagcaacactggtggcaaagccctatgcaaa

SEQ ID NO: 4858 - DNA, 46 bp, Artificial Sequence
  Description of Artificial Sequence: Synthetic primer
  Description of Combined DNA/RNA Molecule: Synthetic primer
acgacgacgacgaactttctccatggcaactgtctacaccacaggt

SEQ ID NO: 4859 - DNA, 44 bp, Artificial Sequence
  Description of Artificial Sequence: Synthetic primer
  Description of Combined DNA/RNA Molecule: Synthetic primer
acgacgacgacgaacatggcaactgtctacaccacaggcuggaa

SEQ ID NO: 4860 - DNA, 65 bp, Artificial Sequence
  Description of Artificial Sequence: Synthetic primer
  Description of Combined DNA/RNA Molecule: Synthetic primer
acgacgacgacttgacgaacataatgctctaatatttgttttccaccaagttttatgaccugatt

SEQ ID NO: 4861 - DNA, 46 bp, Artificial Sequence
  Description of Artificial Sequence: Synthetic oligonucleotide
  Description of Combined DNA/RNA Molecule: Synthetic oligonucleotide
ttgtgcagagcgaacaacaagctgcccattaccagagctcauaaat

SEQ ID NO: 4862 - DNA, 51 bp, Artificial Sequence
  Description of Artificial Sequence: Synthetic oligonucleotide
taagcagtatgggtgctggacaaacagcatttgctatttggtgtaccgcca

SEQ ID NO: 4863 - DNA, 33 bp, Artificial Sequence
  Description of Artificial Sequence: Synthetic probe
ttgagctcataagcagtatgggtgctggacaaa

SEQ ID NO: 4864 - DNA, 20 bp, Artificial Sequence
  Description of Artificial Sequence: Synthetic primer
ttgtgcagagcgaacaacaa

SEQ ID NO: 4865 - DNA, 21 bp, Artificial Sequence
  Description of Artificial Sequence: Synthetic primer
tggcggtacaccaaatagcaa

SEQ ID NO: 4866 - DNA, 57 bp, Artificial Sequence
  Description of Artificial Sequence: Synthetic primer
  Description of Combined DNA/RNA Molecule: Synthetic primer
tggcggtacaccaaatagcaatgttttccaccaagttttatgacctgatcgtgctgc

SEQ ID NO: 4867 - DNA, 40 bp, Artificial Sequence
  Description of Artificial Sequence: Synthetic primer
  Description of Combined DNA/RNA Molecule: Synthetic primer
acgacgacgacgaaggccttggcacacactcaccagggta

SEQ ID NO: 4868 - DNA, 38 bp, Artificial Sequence
  Description of Artificial Sequence: Synthetic primer
  Description of Combined DNA/RNA Molecule: Synthetic primer
acgacgacgacgaagccaggccttggcacacacucact

SEQ ID NO: 4869 - DNA, 50 bp, Artificial Sequence
  Description of Artificial Sequence: Synthetic primer
  Description of Combined DNA/RNA Molecule: Synthetic primer
acgacgacgacttgacgaacataatcctgcttgctccttgtggccucccc

SEQ ID NO: 4870 - DNA, 53 bp, Artificial Sequence
  Description of Artificial Sequence: Synthetic oligonucleotide
  Description of Combined DNA/RNA Molecule: Synthetic oligonucleotide
tccaaacgattaggagcgtcaacattcaccaccaacaggttgtagtcauagga

SEQ ID NO: 4871 - DNA, 48 bp, Artificial Sequence
  Description of Artificial Sequence: Synthetic oligonucleotide
tagaggaaggaggagccaaaggcacccttggacagaggtatacgccca

SEQ ID NO: 4872 - DNA, 33 bp, Artificial Sequence
  Description of Artificial Sequence: Synthetic probe
aagtagtcatagaggaaggaggagccaaaggca

SEQ ID NO: 4873 - DNA, 22 bp, Artificial Sequence
  Description of Artificial Sequence: Synthetic primer
tccaaacgattaggagcgtcaa

SEQ ID NO: 4874 - DNA, 21 bp, Artificial Sequence
  Description of Artificial Sequence: Synthetic primer
tgggcgtatacctctgtccaa

SEQ ID NO: 4875 - DNA, 47 bp, Artificial Sequence
  Description of Artificial Sequence: Synthetic primer
  Description of Combined DNA/RNA Molecule: Synthetic primer
tgggcgtatacctctgtccaagctccttgtggcctcccttatgggta

SEQ ID NO: 4876 - DNA, 38 bp, Artificial Sequence
  Description of Artificial Sequence: Synthetic primer
  Description of Combined DNA/RNA Molecule: Synthetic primer
acgacgacgacgaacatgcccactgttgaggcaaccct

SEQ ID NO: 4877 - DNA, 43 bp, Artificial Sequence
  Description of Artificial Sequence: Synthetic primer
  Description of Combined DNA/RNA Molecule: Synthetic primer
acgacgacgacgaacccttacttagctcccatgcccacugtta

SEQ ID NO: 4878 - DNA, 52 bp, Artificial Sequence
  Description of Artificial Sequence: Synthetic primer
  Description of Combined DNA/RNA Molecule: Synthetic primer
acgacgacgacttgacgaacataatgtgtcacctccaaggtgctggagctga

SEQ ID NO: 4879 - DNA, 47 bp, Artificial Sequence
  Description of Artificial Sequence: Synthetic oligonucleotide
  Description of Combined DNA/RNA Molecule: Synthetic oligonucleotide
tccaaacgattaggagcgtcaacccaaccccatccactctcauccgc

SEQ ID NO: 4880 - DNA, 44 bp, Artificial Sequence
  Description of Artificial Sequence: Synthetic oligonucleotide
tccatccctgtctgcccctgcacttggacagaggtatacgccca

SEQ ID NO: 4881 - DNA, 27 bp, Artificial Sequence
  Description of Artificial Sequence: Synthetic probe
ttactctcatccatccctgtctgcccc

SEQ ID NO: 4882 - DNA, 22 bp, Artificial Sequence
  Description of Artificial Sequence: Synthetic primer
tccaaacgattaggagcgtcaa

SEQ ID NO: 4883 - DNA, 21 bp, Artificial Sequence
  Description of Artificial Sequence: Synthetic primer
tgggcgtatacctctgtccaa

SEQ ID NO: 4884 - DNA, 47 bp, Artificial Sequence
  Description of Artificial Sequence: Synthetic primer
  Description of Combined DNA/RNA Molecule: Synthetic primer
tgggcgtatacctctgtccaaggtgctggagctgggtaagatgcaga

SEQ ID NO: 4885 - DNA, 43 bp, Artificial Sequence
  Description of Artificial Sequence: Synthetic primer
  Description of Combined DNA/RNA Molecule: Synthetic primer
acgacgacgacgaactggccttggttttgttgtggtcagcatt

SEQ ID NO: 4886 - DNA, 38 bp, Artificial Sequence
  Description of Artificial Sequence: Synthetic primer
  Description of Combined DNA/RNA Molecule: Synthetic primer
acgacgacgacgaacaagcacagagccctggccutggc

SEQ ID NO: 4887 - DNA, 62 bp, Artificial Sequence
  Description of Artificial Sequence: Synthetic primer
  Description of Combined DNA/RNA Molecule: Synthetic primer
acgacgacgacttgacgaacataatacaaaagctatcagattgcaaaagacagtgaaugtga

SEQ ID NO: 4888 - DNA, 49 bp, Artificial Sequence
  Description of Artificial Sequence: Synthetic oligonucleotide
  Description of Combined DNA/RNA Molecule: Synthetic oligonucleotide
ttgcagcgggtcacaacaacatcatgtcaccctctcttctgtcaccctg

SEQ ID NO: 4889 - DNA, 55 bp, Artificial Sequence
  Description of Artificial Sequence: Synthetic oligonucleotide
ccccacacttcctttgtacatagttaataagcagttggacagaggtatacgccca

SEQ ID NO: 4890 - DNA, 36 bp, Artificial Sequence
  Description of Artificial Sequence: Synthetic probe
aatctgtcaccccacacttcctttgtacatagttaa

SEQ ID NO: 4891 - DNA, 19 bp, Artificial Sequence
  Description of Artificial Sequence: Synthetic primer
ttgcagcgggtcacaacaa

SEQ ID NO: 4892 - DNA, 21 bp, Artificial Sequence
  Description of Artificial Sequence: Synthetic primer
tgggcgtatacctctgtccaa

SEQ ID NO: 4893 - DNA, 56 bp, Artificial Sequence
  Description of Artificial Sequence: Synthetic primer
  Description of Combined DNA/RNA Molecule: Synthetic primer
tgggcgtatacctctgtccaatcagattgcaaaagacagtgaatgtggaatgacat

SEQ ID NO: 4894 - DNA, 38 bp, Artificial Sequence
  Description of Artificial Sequence: Synthetic primer
  Description of Combined DNA/RNA Molecule: Synthetic primer
acgacgacgacgaagccacagcctccagagccautgcg

SEQ ID NO: 4895 - DNA, 41 bp, Artificial Sequence
  Description of Artificial Sequence: Synthetic primer
  Description of Combined DNA/RNA Molecule: Synthetic primer
acgacgacgacgaattactcagccacagcctccagagccac

SEQ ID NO: 4896 - DNA, 51 bp, Artificial Sequence
  Description of Artificial Sequence: Synthetic primer
  Description of Combined DNA/RNA Molecule: Synthetic primer
acgacgacgacttgacgaacataatctccttgggcactgccaggtgagcta

SEQ ID NO: 4897 - DNA, 45 bp, Artificial Sequence
  Description of Artificial Sequence: Synthetic oligonucleotide
  Description of Combined DNA/RNA Molecule: Synthetic oligonucleotide
tcgtcccggtcagtagtcaacacacctacctgcccagtcaactcg

SEQ ID NO: 4898 - DNA, 49 bp, Artificial Sequence
  Description of Artificial Sequence: Synthetic oligonucleotide
acttacctgtacttgccaccatcccagctttgcccattttctgcaccca

SEQ ID NO: 4899 - DNA, 31 bp, Artificial Sequence
  Description of Artificial Sequence: Synthetic probe
ttccagtcaacttacctgtacttgccaccat

SEQ ID NO: 4900 - DNA, 20 bp, Artificial Sequence
  Description of Artificial Sequence: Synthetic primer
tcgtcccggtcagtagtcaa

SEQ ID NO: 4901 - DNA, 20 bp, Artificial Sequence
  Description of Artificial Sequence: Synthetic primer
tgggtgcagaaaatgggcaa

SEQ ID NO: 4902 - DNA, 44 bp, Artificial Sequence
  Description of Artificial Sequence: Synthetic primer
  Description of Combined DNA/RNA Molecule: Synthetic primer
tgggtgcagaaaatgggcaagggcactgccaggtgagttgggac

SEQ ID NO: 4903 - DNA, 41 bp, Artificial Sequence
  Description of Artificial Sequence: Synthetic primer
  Description of Combined DNA/RNA Molecule: Synthetic primer
acgacgacgacgaagggagatccaaacagctgtgcacctgt

SEQ ID NO: 4904 - DNA, 42 bp, Artificial Sequence
  Description of Artificial Sequence: Synthetic primer
  Description of Combined DNA/RNA Molecule: Synthetic primer
acgacgacgacgaagatccaaacagctgtgcacctgcugctg

SEQ ID NO: 4905 - DNA, 58 bp, Artificial Sequence
  Description of Artificial Sequence: Synthetic primer
  Description of Combined DNA/RNA Molecule: Synthetic primer
acgacgacgacttgacgaacataatgagcctttgggttgttagtgcttttacccaggc

SEQ ID NO: 4906 - DNA, 46 bp, Artificial Sequence
  Description of Artificial Sequence: Synthetic oligonucleotide
  Description of Combined DNA/RNA Molecule: Synthetic oligonucleotide
ttcgtgcgtcgtgtagcaacagggagctggccaaacacgcagtgct

SEQ ID NO: 4907 - DNA, 46 bp, Artificial Sequence
  Description of Artificial Sequence: Synthetic oligonucleotide
gtgtcagagggcaccaaggcagtcacttgcccattttctgcaccca

SEQ ID NO: 4908 - DNA, 24 bp, Artificial Sequence
  Description of Artificial Sequence: Synthetic probe
ttacacgcagtgtcagagggcacc

SEQ ID NO: 4909 - DNA, 19 bp, Artificial Sequence
  Description of Artificial Sequence: Synthetic primer
ttcgtgcgtcgtgtagcaa

SEQ ID NO: 4910 - DNA, 20 bp, Artificial Sequence
  Description of Artificial Sequence: Synthetic primer
tgggtgcagaaaatgggcaa

SEQ ID NO: 4911 - DNA, 54 bp, Artificial Sequence
  Description of Artificial Sequence: Synthetic primer
  Description of Combined DNA/RNA Molecule: Synthetic primer
tgggtgcagaaaatgggcaatttacttggagctggtgtacttggtgattgcctc

SEQ ID NO: 4912 - DNA, 36 bp, Artificial Sequence
  Description of Artificial Sequence: Synthetic primer
  Description of Combined DNA/RNA Molecule: Synthetic primer
acgacgacgacgaaggcagcccaggtgcacagtgga

SEQ ID NO: 4913 - DNA, 37 bp, Artificial Sequence
  Description of Artificial Sequence: Synthetic primer
  Description of Combined DNA/RNA Molecule: Synthetic primer
acgacgacgacgaagcagcccaggtgcacagtgggcg

SEQ ID NO: 4914 - DNA, 54 bp, Artificial Sequence
  Description of Artificial Sequence: Synthetic primer
  Description of Combined DNA/RNA Molecule: Synthetic primer
acgacgacgacttgacgaacataatgcatggtgaggagaccttgtcctcutgct

SEQ ID NO: 4915 - DNA, 42 bp, Artificial Sequence
  Description of Artificial Sequence: Synthetic oligonucleotide
  Description of Combined DNA/RNA Molecule: Synthetic oligonucleotide
ttcgtgcgtcgtgtagcaaggcagtggcctgggtacacagca

SEQ ID NO: 4916 - DNA, 45 bp, Artificial Sequence
  Description of Artificial Sequence: Synthetic oligonucleotide
cagtgggcagcaccatccaggcttgttgcccattttctgcaccca

SEQ ID NO: 4917 - DNA, 26 bp, Artificial Sequence
  Description of Artificial Sequence: Synthetic probe
aagggtacacagtgggcagcaccatc

SEQ ID NO: 4918 - DNA, 19 bp, Artificial Sequence
  Description of Artificial Sequence: Synthetic primer
ttcgtgcgtcgtgtagcaa

SEQ ID NO: 4919 - DNA, 20 bp, Artificial Sequence
  Description of Artificial Sequence: Synthetic primer
tgggtgcagaaaatgggcaa

SEQ ID NO: 4920 - DNA, 51 bp, Artificial Sequence
  Description of Artificial Sequence: Synthetic primer
  Description of Combined DNA/RNA Molecule: Synthetic primer
tgggtgcagaaaatgggcaaggagaccttgtcctcttgccaacactgcagt

SEQ ID NO: 4921 - DNA, 45 bp, Artificial Sequence
  Description of Artificial Sequence: Synthetic primer
  Description of Combined DNA/RNA Molecule: Synthetic primer
acgacgacgacgaagcaagacccagtatgttcacaccacaagtga

SEQ ID NO: 4922 - DNA, 41 bp, Artificial Sequence
  Description of Artificial Sequence: Synthetic primer
  Description of Combined DNA/RNA Molecule: Synthetic primer
acgacgacgacgaagggaaaggagaggcaagacccagtata

SEQ ID NO: 4923 - DNA, 54 bp, Artificial Sequence
  Description of Artificial Sequence: Synthetic primer
  Description of Combined DNA/RNA Molecule: Synthetic primer
acgacgacgacttgacgaacataatcaaggtgggtgaggctgtgatttcutcta

SEQ ID NO: 4924 - DNA, 46 bp, Artificial Sequence
  Description of Artificial Sequence: Synthetic oligonucleotide
  Description of Combined DNA/RNA Molecule: Synthetic oligonucleotide
tcggagagaggagccctaaacgtgggtgggcagtgctcgcacagat

SEQ ID NO: 4925 - DNA, 48 bp, Artificial Sequence
  Description of Artificial Sequence: Synthetic oligonucleotide
caggcagagaagaacaggcacagcaatgcgtttcctctgtgcggacca

SEQ ID NO: 4926 - DNA, 27 bp, Artificial Sequence
  Description of Artificial Sequence: Synthetic probe
aagctcgcacaggcagagaagaacagg

SEQ ID NO: 4927 - DNA, 21 bp, Artificial Sequence
  Description of Artificial Sequence: Synthetic primer
tcggagagaggagccctaaac

SEQ ID NO: 4928 - DNA, 19 bp, Artificial Sequence
  Description of Artificial Sequence: Synthetic primer
tggtccgcacagaggaaac

SEQ ID NO: 4929 - DNA, 50 bp, Artificial Sequence
  Description of Artificial Sequence: Synthetic primer
  Description of Combined DNA/RNA Molecule: Synthetic primer
tggtccgcacagaggaaacggctgtgatttcttctgcattgctatgccta

SEQ ID NO: 4930 - DNA, 41 bp, Artificial Sequence
  Description of Artificial Sequence: Synthetic primer
  Description of Combined DNA/RNA Molecule: Synthetic primer
acgacgacgacgaaggagcaaaacccagaggtcccaggcat

SEQ ID NO: 4931 - DNA, 41 bp, Artificial Sequence
  Description of Artificial Sequence: Synthetic primer
  Description of Combined DNA/RNA Molecule: Synthetic primer
acgacgacgacgaaaaaacccagaggtcccaggcaccttga

SEQ ID NO: 4932 - DNA, 53 bp, Artificial Sequence
  Description of Artificial Sequence: Synthetic primer
  Description of Combined DNA/RNA Molecule: Synthetic primer
acgacgacgacttgacgaacataatctctgcctggatgatgggtgctcctgga

SEQ ID NO: 4933 - DNA, 46 bp, Artificial Sequence
  Description of Artificial Sequence: Synthetic oligonucleotide
  Description of Combined DNA/RNA Molecule: Synthetic oligonucleotide
tggcgtaaggacactctgaaacgggcagagccagagcaacaggaat

SEQ ID NO: 4934 - DNA, 43 bp, Artificial Sequence
  Description of Artificial Sequence: Synthetic oligonucleotide
ggagccagtcctgggcacattgccgtttcctctgtgcggacca

SEQ ID NO: 4935 - DNA, 24 bp, Artificial Sequence
  Description of Artificial Sequence: Synthetic probe
ttagcaacaggagccagtcctggg

SEQ ID NO: 4936 - DNA, 22 bp, Artificial Sequence
  Description of Artificial Sequence: Synthetic primer
tggcgtaaggacactctgaaac

SEQ ID NO: 4937 - DNA, 19 bp, Artificial Sequence
  Description of Artificial Sequence: Synthetic primer
tggtccgcacagaggaaac

SEQ ID NO: 4938 - DNA, 43 bp, Artificial Sequence
  Description of Artificial Sequence: Synthetic primer
  Description of Combined DNA/RNA Molecule: Synthetic primer
tggtccgcacagaggaaacggtgctcctgaggcaatatgcccg

SEQ ID NO: 4939 - DNA, 40 bp, Artificial Sequence
  Description of Artificial Sequence: Synthetic primer
  Description of Combined DNA/RNA Molecule: Synthetic primer
acgacgacgacgaagccactgggcatctgaaggcacagga

SEQ ID NO: 4940 - DNA, 37 bp, Artificial Sequence
  Description of Artificial Sequence: Synthetic primer
  Description of Combined DNA/RNA Molecule: Synthetic primer
acgacgacgacgaacagggagggccactgggcatcta

SEQ ID NO: 4941 - DNA, 51 bp, Artificial Sequence
  Description of Artificial Sequence: Synthetic primer
  Description of Combined DNA/RNA Molecule: Synthetic primer
acgacgacgacttgacgaacataatagctgctgcccctcctactgcugtgc

SEQ ID NO: 4942 - DNA, 46 bp, Artificial Sequence
  Description of Artificial Sequence: Synthetic oligonucleotide
  Description of Combined DNA/RNA Molecule: Synthetic oligonucleotide
tcacgcacgtagggtctaaacctggaggagcagcaacttcaggaga

SEQ ID NO: 4943 - DNA, 47 bp, Artificial Sequence
  Description of Artificial Sequence: Synthetic oligonucleotide
ggaagagcagggccacagacaatggacgttgtccggctgtggttaca

SEQ ID NO: 4944 - DNA, 28 bp, Artificial Sequence
  Description of Artificial Sequence: Synthetic probe
ttaacttcaggaagagcagggccacaga

SEQ ID NO: 4945 - DNA, 21 bp, Artificial Sequence
  Description of Artificial Sequence: Synthetic primer
tcacgcacgtagggtctaaac

SEQ ID NO: 4946 - DNA, 20 bp, Artificial Sequence
  Description of Artificial Sequence: Synthetic primer
tgtaaccacagccggacaac

SEQ ID NO: 4947 - DNA, 45 bp, Artificial Sequence
  Description of Artificial Sequence: Synthetic primer
  Description of Combined DNA/RNA Molecule: Synthetic primer
tgtaaccacagccggacaacgctgcccctcctactgctatgtccg

SEQ ID NO: 4948 - DNA, 43 bp, Artificial Sequence
  Description of Artificial Sequence: Synthetic primer
  Description of Combined DNA/RNA Molecule: Synthetic primer
acgacgacgacgaaccttcctccacattaccttgggcaugtaa

SEQ ID NO: 4949 - DNA, 45 bp, Artificial Sequence
  Description of Artificial Sequence: Synthetic primer
  Description of Combined DNA/RNA Molecule: Synthetic primer
acgacgacgacgaactccacattaccttgggcatgtaggcutcct

SEQ ID NO: 4950 - DNA, 54 bp, Artificial Sequence
  Description of Artificial Sequence: Synthetic primer
  Description of Combined DNA/RNA Molecule: Synthetic primer
acgacgacgacttgacgaacataatggagtggaaagagttgggtggagcaggta

SEQ ID NO: 4951 - DNA, 47 bp, Artificial Sequence
  Description of Artificial Sequence: Synthetic oligonucleotide
  Description of Combined DNA/RNA Molecule: Synthetic oligonucleotide
tcttacgcccagggaatgtaacccatggacctgcccacatcacccgt

SEQ ID NO: 4952 - DNA, 47 bp, Artificial Sequence
  Description of Artificial Sequence: Synthetic oligonucleotide
cccactcagctctcagctgtcaagcaggttgtccggctgtggttaca

SEQ ID NO: 4953 - DNA, 30 bp, Artificial Sequence
  Description of Artificial Sequence: Synthetic probe
ttcacatcacccactcagctctcagctgtc

SEQ ID NO: 4954 - DNA, 22 bp, Artificial Sequence
  Description of Artificial Sequence: Synthetic primer
tcttacgcccagggaatgtaac

SEQ ID NO: 4955 - DNA, 20 bp, Artificial Sequence
  Description of Artificial Sequence: Synthetic primer
tgtaaccacagccggacaac

SEQ ID NO: 4956 - DNA, 48 bp, Artificial Sequence
  Description of Artificial Sequence: Synthetic primer
  Description of Combined DNA/RNA Molecule: Synthetic primer
tgtaaccacagccggacaacggaaagagttgggtggagcagatggcta

SEQ ID NO: 4957 - DNA, 39 bp, Artificial Sequence
  Description of Artificial Sequence: Synthetic primer
  Description of Combined DNA/RNA Molecule: Synthetic primer
acgacgacgacgaagcacccactctcaccagccagggat

SEQ ID NO: 4958 - DNA, 40 bp, Artificial Sequence
  Description of Artificial Sequence: Synthetic primer
  Description of Combined DNA/RNA Molecule: Synthetic primer
acgacgacgacgaaccactctcaccagccagggacatctg

SEQ ID NO: 4959 - DNA, 49 bp, Artificial Sequence
  Description of Artificial Sequence: Synthetic primer
  Description of Combined DNA/RNA Molecule: Synthetic primer
acgacgacgacttgacgaacataatgggaccagagtggtgaggcuggac

SEQ ID NO: 4960 - DNA, 43 bp, Artificial Sequence
  Description of Artificial Sequence: Synthetic oligonucleotide
  Description of Combined DNA/RNA Molecule: Synthetic oligonucleotide
tgagcaaaatcttcgtcgaccgccagggccaggccgcaccact

SEQ ID NO: 4961 - DNA, 41 bp, Artificial Sequence
  Description of Artificial Sequence: Synthetic oligonucleotide
ccacctcccagtccccaccccggttcgatgccttccgtaca

SEQ ID NO: 4962 - DNA, 20 bp, Artificial Sequence
  Description of Artificial Sequence: Synthetic probe
ttggccgcaccacctcccag

SEQ ID NO: 4963 - DNA, 21 bp, Artificial Sequence
  Description of Artificial Sequence: Synthetic primer
tgagcaaaatcttcgtcgacc

SEQ ID NO: 4964 - DNA, 20 bp, Artificial Sequence
  Description of Artificial Sequence: Synthetic primer
tgtacggaaggcatcgaacc

SEQ ID NO: 4965 - DNA, 43 bp, Artificial Sequence
  Description of Artificial Sequence: Synthetic primer
  Description of Combined DNA/RNA Molecule: Synthetic primer
tgtacggaaggcatcgaaccggtgaggctggatgggatgggag

SEQ ID NO: 4966 - DNA, 39 bp, Artificial Sequence
  Description of Artificial Sequence: Synthetic primer
  Description of Combined DNA/RNA Molecule: Synthetic primer
acgacgacgacgaagcctgaaggctgaggctacagagag

SEQ ID NO: 4967 - DNA, 39 bp, Artificial Sequence
  Description of Artificial Sequence: Synthetic primer
  Description of Combined DNA/RNA Molecule: Synthetic primer
acgacgacgacgaatagaggctgcacagcctgaaggcta

SEQ ID NO: 4968 - DNA, 50 bp, Artificial Sequence
  Description of Artificial Sequence: Synthetic primer
  Description of Combined DNA/RNA Molecule: Synthetic primer
acgacgacgacttgacgaacataatgcccaagtgtgtgcctgggagtgta

SEQ ID NO: 4969 - DNA, 46 bp, Artificial Sequence
  Description of Artificial Sequence: Synthetic oligonucleotide
  Description of Combined DNA/RNA Molecule: Synthetic oligonucleotide
tggcacatgagagtagttgaccactccagcccccaaagacaugtat

SEQ ID NO: 4970 - DNA, 47 bp, Artificial Sequence
  Description of Artificial Sequence: Synthetic oligonucleotide
tgtgcacacacactcccacacacacacggttcgatgccttccgtaca

SEQ ID NO: 4971 - DNA, 27 bp, Artificial Sequence
  Description of Artificial Sequence: Synthetic probe
aaaaagacatgtgcacacacactccca

SEQ ID NO: 4972 - DNA, 22 bp, Artificial Sequence
  Description of Artificial Sequence: Synthetic primer
tggcacatgagagtagttgacc

SEQ ID NO: 4973 - DNA, 20 bp, Artificial Sequence
  Description of Artificial Sequence: Synthetic primer
tgtacggaaggcatcgaacc

SEQ ID NO: 4974 - DNA, 47 bp, Artificial Sequence
  Description of Artificial Sequence: Synthetic primer
  Description of Combined DNA/RNA Molecule: Synthetic primer
tgtacggaaggcatcgaaccgtgtgcctgggagtgtgtgtatgggta

SEQ ID NO: 4975 - DNA, 40 bp, Artificial Sequence
  Description of Artificial Sequence: Synthetic primer
  Description of Combined DNA/RNA Molecule: Synthetic primer
acgacgacgacgaacaccactcccaggagtctgcaggcta

SEQ ID NO: 4976 - DNA, 39 bp, Artificial Sequence
  Description of Artificial Sequence: Synthetic primer
  Description of Combined DNA/RNA Molecule: Synthetic primer
acgacgacgacgaaactcccaggagtctgcaggcugcct

SEQ ID NO: 4977 - DNA, 56 bp, Artificial Sequence
  Description of Artificial Sequence: Synthetic primer
  Description of Combined DNA/RNA Molecule: Synthetic primer
acgacgacgacttgacgaacataatggtgacttgtgagagtggtgtggagagctgt

SEQ ID NO: 4978 - DNA, 51 bp, Artificial Sequence
  Description of Artificial Sequence: Synthetic oligonucleotide
  Description of Combined DNA/RNA Molecule: Synthetic oligonucleotide
tatagtcacgcaggaccacacccatcccctccacaaagtctacccaaactt

SEQ ID NO: 4979 - DNA, 47 bp, Artificial Sequence
  Description of Artificial Sequence: Synthetic oligonucleotide
aaccctgcagtcacaccttggctgtgtgtttgcggctgtctatgaca

SEQ ID NO: 4980 - DNA, 26 bp, Artificial Sequence
  Description of Artificial Sequence: Synthetic probe
aactacccaaaccctgcagtcacacc

SEQ ID NO: 4981 - DNA, 20 bp, Artificial Sequence
  Description of Artificial Sequence: Synthetic primer
tatagtcacgcaggaccaca

SEQ ID NO: 4982 - DNA, 21 bp, Artificial Sequence
  Description of Artificial Sequence: Synthetic primer
tgtcatagacagccgcaaaca

SEQ ID NO: 4983 - DNA, 52 bp, Artificial Sequence
  Description of Artificial Sequence: Synthetic primer
  Description of Combined DNA/RNA Molecule: Synthetic primer
tgtcatagacagccgcaaacagacttgtgagagtggtgtggagagttgcatc

SEQ ID NO: 4984 - DNA, 44 bp, Artificial Sequence
  Description of Artificial Sequence: Synthetic primer
  Description of Combined DNA/RNA Molecule: Synthetic primer
acgacgacgacgaactccagatttctctcaacagggccaccttg

SEQ ID NO: 4985 - DNA, 44 bp, Artificial Sequence
  Description of Artificial Sequence: Synthetic primer
  Description of Combined DNA/RNA Molecule: Synthetic primer
acgacgacgacgaaccagatttctctcaacagggccaccutaaa

SEQ ID NO: 4986 - DNA, 50 bp, Artificial Sequence
  Description of Artificial Sequence: Synthetic primer
  Description of Combined DNA/RNA Molecule: Synthetic primer
acgacgacgacttgacgaacataattgaggcagcctgcagactccugggc

SEQ ID NO: 4987 - DNA, 51 bp, Artificial Sequence
  Description of Artificial Sequence: Synthetic oligonucleotide
  Description of Combined DNA/RNA Molecule: Synthetic oligonucleotide
tgccctatcgaaaaggacaacagtccatgagtagaagggcactacagcaag

SEQ ID NO: 4988 - DNA, 52 bp, Artificial Sequence
  Description of Artificial Sequence: Synthetic oligonucleotide
gcagacactggcagccacaggttgaatgacatgtttgcggctgtctatgaca

SEQ ID NO: 4989 - DNA, 27 bp, Artificial Sequence
  Description of Artificial Sequence: Synthetic probe
ttcactacagcagacactggcagccac

SEQ ID NO: 4990 - DNA, 22 bp, Artificial Sequence
  Description of Artificial Sequence: Synthetic primer
tgccctatcgaaaaggacaaca

SEQ ID NO: 4991 - DNA, 21 bp, Artificial Sequence
  Description of Artificial Sequence: Synthetic primer
tgtcatagacagccgcaaaca

SEQ ID NO: 4992 - DNA, 48 bp, Artificial Sequence
  Description of Artificial Sequence: Synthetic primer
  Description of Combined DNA/RNA Molecule: Synthetic primer
tgtcatagacagccgcaaacagactcctgggagtggtgctggtgggag

SEQ ID NO: 4993 - DNA, 42 bp, Artificial Sequence
  Description of Artificial Sequence: Synthetic primer
  Description of Combined DNA/RNA Molecule: Synthetic primer
acgacgacgacgaactccaaccttcccagcctcatcaacccg

SEQ ID NO: 4994 - DNA, 43 bp, Artificial Sequence
  Description of Artificial Sequence: Synthetic primer
  Description of Combined DNA/RNA Molecule: Synthetic primer
acgacgacgacgaaccaaccttcccagcctcatcaacccagta

SEQ ID NO: 4995 - DNA, 56 bp, Artificial Sequence
  Description of Artificial Sequence: Synthetic primer
  Description of Combined DNA/RNA Molecule: Synthetic primer
acgacgacgacttgacgaacataatgatctgtgagtgtgtgtgtgggtggggggta

SEQ ID NO: 4996 - DNA, 45 bp, Artificial Sequence
  Description of Artificial Sequence: Synthetic oligonucleotide
  Description of Combined DNA/RNA Molecule: Synthetic oligonucleotide
taatctccagacctccgaaccggagcagggctggtgaacaccctg

SEQ ID NO: 4997 - DNA, 44 bp, Artificial Sequence
  Description of Artificial Sequence: Synthetic oligonucleotide
ccccaagccacatccccctcccggtgtaaggattgaacgggaca

SEQ ID NO: 4998 - DNA, 26 bp, Artificial Sequence
  Description of Artificial Sequence: Synthetic probe
aagtgaacaccccaagccacatcccc

SEQ ID NO: 4999 - DNA, 21 bp, Artificial Sequence
  Description of Artificial Sequence: Synthetic primer
taatctccagacctccgaacc

SEQ ID NO: 5000 - DNA, 22 bp, Artificial Sequence
  Description of Artificial Sequence: Synthetic primer
tgtcccgttcaatccttacacc

SEQ ID NO: 5001 - DNA, 45 bp, Artificial Sequence
  Description of Artificial Sequence: Synthetic primer
  Description of Combined DNA/RNA Molecule: Synthetic primer
tgtcccgttcaatccttacacctgtgggtggagggtgtatgggag

SEQ ID NO: 5002 - DNA, 47 bp, Artificial Sequence
  Description of Artificial Sequence: Synthetic primer
  Description of Combined DNA/RNA Molecule: Synthetic primer
acgacgacgacgaagccaccaagacttccaataaaacatgcautccc

SEQ ID NO: 5003 - DNA, 40 bp, Artificial Sequence
  Description of Artificial Sequence: Synthetic primer
  Description of Combined DNA/RNA Molecule: Synthetic primer
acgacgacgacgaaccccctgccaccaagacttccaatag

SEQ ID NO: 5004 - DNA, 52 bp, Artificial Sequence
  Description of Artificial Sequence: Synthetic primer
  Description of Combined DNA/RNA Molecule: Synthetic primer
acgacgacgacttgacgaacataatccttcctctagggtgaggtgcccccta

SEQ ID NO: 5005 - DNA, 51 bp, Artificial Sequence
  Description of Artificial Sequence: Synthetic oligonucleotide
  Description of Combined DNA/RNA Molecule: Synthetic oligonucleotide
ttttccgcgtcagagcacacctctcaacagcactttgtcagtcccagtctt

SEQ ID NO: 5006 - DNA, 50 bp, Artificial Sequence
  Description of Artificial Sequence: Synthetic oligonucleotide
gtccctcagcacaaaacaccagcaccactgttatcggacctagctcgaca

SEQ ID NO: 5007 - DNA, 28 bp, Artificial Sequence
  Description of Artificial Sequence: Synthetic probe
aaagtcccagtccctcagcacaaaacac

SEQ ID NO: 5008 - DNA, 19 bp, Artificial Sequence
  Description of Artificial Sequence: Synthetic primer
ttttccgcgtcagagcaca

SEQ ID NO: 5009 - DNA, 22 bp, Artificial Sequence
  Description of Artificial Sequence: Synthetic primer
tgtcgagctaggtccgataaca

SEQ ID NO: 5010 - DNA, 44 bp, Artificial Sequence
  Description of Artificial Sequence: Synthetic primer
  Description of Combined DNA/RNA Molecule: Synthetic primer
tgtcgagctaggtccgataacatgctgaggcccagtgatgctga

SEQ ID NO: 5011 - DNA, 38 bp, Artificial Sequence
  Description of Artificial Sequence: Synthetic primer
  Description of Combined DNA/RNA Molecule: Synthetic primer
acgacgacgacgaaccccaggtctgtccacccacaggt

SEQ ID NO: 5012 - DNA, 42 bp, Artificial Sequence
  Description of Artificial Sequence: Synthetic primer
  Description of Combined DNA/RNA Molecule: Synthetic primer
acgacgacgacgaagacccccaatctccatgttccccccaga

SEQ ID NO: 5013 - DNA, 52 bp, Artificial Sequence
  Description of Artificial Sequence: Synthetic primer
  Description of Combined DNA/RNA Molecule: Synthetic primer
acgacgacgacttgacgaacataatctccctccttccctcccactgcugtgc

SEQ ID NO: 5014 - DNA, 48 bp, Artificial Sequence
  Description of Artificial Sequence: Synthetic oligonucleotide
  Description of Combined DNA/RNA Molecule: Synthetic oligonucleotide
ttcgctgcccggttaaacacaggcagtagaaacacctggaacaatgag

SEQ ID NO: 5015 - DNA, 47 bp, Artificial Sequence
  Description of Artificial Sequence: Synthetic oligonucleotide
atggaatccagccaggtgctgcagctgttatcggacctagctcgaca

SEQ ID NO: 5016 - DNA, 28 bp, Artificial Sequence
  Description of Artificial Sequence: Synthetic probe
tttggaacaatggaatccagccaggtgc

SEQ ID NO: 5017 - DNA, 19 bp, Artificial Sequence
  Description of Artificial Sequence: Synthetic primer
ttcgctgcccggttaaaca

SEQ ID NO: 5018 - DNA, 22 bp, Artificial Sequence
  Description of Artificial Sequence: Synthetic primer
tgtcgagctaggtccgataaca

SEQ ID NO: 5019 - DNA, 47 bp, Artificial Sequence
  Description of Artificial Sequence: Synthetic primer
  Description of Combined DNA/RNA Molecule: Synthetic primer
tgtcgagctaggtccgataacacctccttccctcccactgttgtgtt

SEQ ID NO: 5020 - DNA, 43 bp, Artificial Sequence
  Description of Artificial Sequence: Synthetic primer
  Description of Combined DNA/RNA Molecule: Synthetic primer
acgacgacgacgaagcaacaagtctctccactgagccacagcc

SEQ ID NO: 5021 - DNA, 41 bp, Artificial Sequence
  Description of Artificial Sequence: Synthetic primer
  Description of Combined DNA/RNA Molecule: Synthetic primer
acgacgacgacgaacaagtctctccactgagccacaugctg

SEQ ID NO: 5022 - DNA, 50 bp, Artificial Sequence
  Description of Artificial Sequence: Synthetic primer
  Description of Combined DNA/RNA Molecule: Synthetic primer
acgacgacgacttgacgaacataatgtgggccctgactttgctgcucagc

SEQ ID NO: 5023 - DNA, 43 bp, Artificial Sequence
  Description of Artificial Sequence: Synthetic oligonucleotide
  Description of Combined DNA/RNA Molecule: Synthetic oligonucleotide
ttcgctgcccggttaaacagctcctccaccagggcgcagcctt

SEQ ID NO: 5024 - DNA, 42 bp, Artificial Sequence
  Description of Artificial Sequence: Synthetic oligonucleotide
gccccccctgcaccccaaactgttatcggacctagctcgaca

SEQ ID NO: 5025 - DNA, 16 bp, Artificial Sequence
  Description of Artificial Sequence: Synthetic probe
ttgggcgcagcccccc

SEQ ID NO: 5026 - DNA, 19 bp, Artificial Sequence
  Description of Artificial Sequence: Synthetic primer
ttcgctgcccggttaaaca

SEQ ID NO: 5027 - DNA, 22 bp, Artificial Sequence
  Description of Artificial Sequence: Synthetic primer
tgtcgagctaggtccgataaca

SEQ ID NO: 5028 - DNA, 52 bp, Artificial Sequence
  Description of Artificial Sequence: Synthetic primer
  Description of Combined DNA/RNA Molecule: Synthetic primer
tgtcgagctaggtccgataacactgactttgctgctcagtttgggatgcaga

SEQ ID NO: 5029 - DNA, 39 bp, Artificial Sequence
  Description of Artificial Sequence: Synthetic primer
  Description of Combined DNA/RNA Molecule: Synthetic primer
acgacgacgacgaagcccctcagtcagggacacaggcct

SEQ ID NO: 5030 - DNA, 40 bp, Artificial Sequence
  Description of Artificial Sequence: Synthetic primer
  Description of Combined DNA/RNA Molecule: Synthetic primer
acgacgacgacgaacctcagtcagggacacaggcccccaa

SEQ ID NO: 5031 - DNA, 47 bp, Artificial Sequence
  Description of Artificial Sequence: Synthetic primer
  Description of Combined DNA/RNA Molecule: Synthetic primer
acgacgacgacttgacgaacataatcctgagggtgaggtgggggtga

SEQ ID NO: 5032 - DNA, 47 bp, Artificial Sequence
  Description of Artificial Sequence: Synthetic oligonucleotide
  Description of Combined DNA/RNA Molecule: Synthetic oligonucleotide
tgctatgccgcattcaaccagggctctccaggaagcaaaacagataa

SEQ ID NO: 5033 - DNA, 50 bp, Artificial Sequence
  Description of Artificial Sequence: Synthetic oligonucleotide
gatggaagattactcagctcagggtcccaggtggagctagttcggcgaca

SEQ ID NO: 5034 - DNA, 35 bp, Artificial Sequence
  Description of Artificial Sequence: Synthetic probe
ttcaaaacagatggaagattactcagctcagggtc

SEQ ID NO: 5035 - DNA, 20 bp, Artificial Sequence
  Description of Artificial Sequence: Synthetic primer
tgctatgccgcattcaacca

SEQ ID NO: 5036 - DNA, 19 bp, Artificial Sequence
  Description of Artificial Sequence: Synthetic primer
tgtcgccgaactagctcca

SEQ ID NO: 5037 - DNA, 41 bp, Artificial Sequence
  Description of Artificial Sequence: Synthetic primer
  Description of Combined DNA/RNA Molecule: Synthetic primer
tgtcgccgaactagctccaggtgagggtgaggacttgggat

SEQ ID NO: 5038 - DNA, 45 bp, Artificial Sequence
  Description of Artificial Sequence: Synthetic primer
  Description of Combined DNA/RNA Molecule: Synthetic primer
acgacgacgacgaacatctcacctcacacactgccatccactggg

SEQ ID NO: 5039 - DNA, 43 bp, Artificial Sequence
  Description of Artificial Sequence: Synthetic primer
  Description of Combined DNA/RNA Molecule: Synthetic primer
acgacgacgacgaactcacacactgccatccactggaagcact

SEQ ID NO: 5040 - DNA, 48 bp, Artificial Sequence
  Description of Artificial Sequence: Synthetic primer
  Description of Combined DNA/RNA Molecule: Synthetic primer
acgacgacgacttgacgaacataatggcctggcttggctcagccatga

SEQ ID NO: 5041 - DNA, 44 bp, Artificial Sequence
  Description of Artificial Sequence: Synthetic oligonucleotide
  Description of Combined DNA/RNA Molecule: Synthetic oligonucleotide
tgtgccttacggaaaacccactccacacctccccagacaccaag

SEQ ID NO: 5042 - DNA, 45 bp, Artificial Sequence
  Description of Artificial Sequence: Synthetic oligonucleotide
ccagactccatcccaccccactgcactggagctagttcggcgaca

SEQ ID NO: 5043 - DNA, 26 bp, Artificial Sequence
  Description of Artificial Sequence: Synthetic probe
ttccagacaccagactccatcccacc

SEQ ID NO: 5044 - DNA, 20 bp, Artificial Sequence
  Description of Artificial Sequence: Synthetic primer
tgtgccttacggaaaaccca

SEQ ID NO: 5045 - DNA, 19 bp, Artificial Sequence
  Description of Artificial Sequence: Synthetic primer
tgtcgccgaactagctcca

SEQ ID NO: 5046 - DNA, 43 bp, Artificial Sequence
  Description of Artificial Sequence: Synthetic primer
  Description of Combined DNA/RNA Molecule: Synthetic primer
tgtcgccgaactagctccactcagccatgaggtgggatgcagc

SEQ ID NO: 5047 - DNA, 36 bp, Artificial Sequence
  Description of Artificial Sequence: Synthetic primer
  Description of Combined DNA/RNA Molecule: Synthetic primer
acgacgacgacgaatgaggcagggcctcccaggtta

SEQ ID NO: 5048 - DNA, 38 bp, Artificial Sequence
  Description of Artificial Sequence: Synthetic primer
  Description of Combined DNA/RNA Molecule: Synthetic primer
acgacgacgacgaacagggcctcccaggttggccaata

SEQ ID NO: 5049 - DNA, 50 bp, Artificial Sequence
  Description of Artificial Sequence: Synthetic primer
  Description of Combined DNA/RNA Molecule: Synthetic primer
acgacgacgacttgacgaacataatccccattggctggtggtggaagctt

SEQ ID NO: 5050 - DNA, 47 bp, Artificial Sequence
  Description of Artificial Sequence: Synthetic oligonucleotide
  Description of Combined DNA/RNA Molecule: Synthetic oligonucleotide
tcctgctctgaaaacctacaccctggcactgggtcagagacaccaat

SEQ ID NO: 5051 - DNA, 44 bp, Artificial Sequence
  Description of Artificial Sequence: Synthetic oligonucleotide
ccagccaagtggagggcagagcggttacataggcggcttagaca

SEQ ID NO: 5052 - DNA, 24 bp, Artificial Sequence
  Description of Artificial Sequence: Synthetic probe
aaagagacaccagccaagtggagg

SEQ ID NO: 5053 - DNA, 22 bp, Artificial Sequence
  Description of Artificial Sequence: Synthetic primer
tcctgctctgaaaacctacacc

SEQ ID NO: 5054 - DNA, 22 bp, Artificial Sequence
  Description of Artificial Sequence: Synthetic primer
tgtctaagccgcctatgtaacc

SEQ ID NO: 5055 - DNA, 50 bp, Artificial Sequence
  Description of Artificial Sequence: Synthetic primer
  Description of Combined DNA/RNA Molecule: Synthetic primer
tgtctaagccgcctatgtaacccattggctggtggtggaagctttgccct

SEQ ID NO: 5056 - DNA, 36 bp, Artificial Sequence
  Description of Artificial Sequence: Synthetic primer
  Description of Combined DNA/RNA Molecule: Synthetic primer
acgacgacgacgaacagccaggccacacccaggacg

SEQ ID NO: 5057 - DNA, 37 bp, Artificial Sequence
  Description of Artificial Sequence: Synthetic primer
  Description of Combined DNA/RNA Molecule: Synthetic primer
acgacgacgacgaacagcagccacagccagccaggct

SEQ ID NO: 5058 - DNA, 48 bp, Artificial Sequence
  Description of Artificial Sequence: Synthetic primer
  Description of Combined DNA/RNA Molecule: Synthetic primer
acgacgacgacttgacgaacataatgagaggcagggtgaggacctgga

SEQ ID NO: 5059 - DNA, 51 bp, Artificial Sequence
  Description of Artificial Sequence: Synthetic oligonucleotide
  Description of Combined DNA/RNA Molecule: Synthetic oligonucleotide
tttttacgcacagcaccacccaactgcagagcacagtgagtgagcacagtt

SEQ ID NO: 5060 - DNA, 48 bp, Artificial Sequence
  Description of Artificial Sequence: Synthetic oligonucleotide
cagccagagggagggactcaggcatcggttacataggcggcttagaca

SEQ ID NO: 5061 - DNA, 24 bp, Artificial Sequence
  Description of Artificial Sequence: Synthetic probe
ttgtgagcacagccagagggaggg

SEQ ID NO: 5062 - DNA, 20 bp, Artificial Sequence
  Description of Artificial Sequence: Synthetic primer
tttttacgcacagcaccacc

SEQ ID NO: 5063 - DNA, 22 bp, Artificial Sequence
  Description of Artificial Sequence: Synthetic primer
tgtctaagccgcctatgtaacc

SEQ ID NO: 5064 - DNA, 46 bp, Artificial Sequence
  Description of Artificial Sequence: Synthetic primer
  Description of Combined DNA/RNA Molecule: Synthetic primer
tgtctaagccgcctatgtaacccagggtgaggacctgggctgccta

SEQ ID NO: 5065 - DNA, 42 bp, Artificial Sequence
  Description of Artificial Sequence: Synthetic primer
  Description of Combined DNA/RNA Molecule: Synthetic primer
acgacgacgacgaagtttctcacccaccccaagagcaccaga

SEQ ID NO: 5066 - DNA, 39 bp, Artificial Sequence
  Description of Artificial Sequence: Synthetic primer
  Description of Combined DNA/RNA Molecule: Synthetic primer
acgacgacgacgaacacccaccccaagagcaccaggccc

SEQ ID NO: 5067 - DNA, 50 bp, Artificial Sequence
  Description of Artificial Sequence: Synthetic primer
  Description of Combined DNA/RNA Molecule: Synthetic primer
acgacgacgacttgacgaacataatgcagaacctgggctgagcccuaggc

SEQ ID NO: 5068 - DNA, 51 bp, Artificial Sequence
  Description of Artificial Sequence: Synthetic oligonucleotide
  Description of Combined DNA/RNA Molecule: Synthetic oligonucleotide
tggacacttcgcccttcttaaccccttcttctgattggccaagtcaagttg

SEQ ID NO: 5069 - DNA, 50 bp, Artificial Sequence
  Description of Artificial Sequence: Synthetic oligonucleotide
agtcatcacaagccatgattggctcaggggtttgggatctgggcatcaca

SEQ ID NO: 5070 - DNA, 32 bp, Artificial Sequence
  Description of Artificial Sequence: Synthetic probe
ttcaagtcaagtcatcacaagccatgattggc

SEQ ID NO: 5071 - DNA, 22 bp, Artificial Sequence
  Description of Artificial Sequence: Synthetic primer
tggacacttcgcccttcttaac

SEQ ID NO: 5072 - DNA, 21 bp, Artificial Sequence
  Description of Artificial Sequence: Synthetic primer
tgtgatgcccagatcccaaac

SEQ ID NO: 5073 - DNA, 47 bp, Artificial Sequence
  Description of Artificial Sequence: Synthetic primer
  Description of Combined DNA/RNA Molecule: Synthetic primer
tgtgatgcccagatcccaaacctgagccctaggtgaagggatgggac

SEQ ID NO: 5074 - DNA, 41 bp, Artificial Sequence
  Description of Artificial Sequence: Synthetic primer
  Description of Combined DNA/RNA Molecule: Synthetic primer
acgacgacgacgaaccaccccttcacctagggctcagcccg

SEQ ID NO: 5075 - DNA, 41 bp, Artificial Sequence
  Description of Artificial Sequence: Synthetic primer
  Description of Combined DNA/RNA Molecule: Synthetic primer
acgacgacgacgaaccccttcacctagggctcagcccaggc

SEQ ID NO: 5076 - DNA, 49 bp, Artificial Sequence
  Description of Artificial Sequence: Synthetic primer
  Description of Combined DNA/RNA Molecule: Synthetic primer
acgacgacgacttgacgaacataatcctcctgctgaggaaggcagaaaa

SEQ ID NO: 5077 - DNA, 46 bp, Artificial Sequence
  Description of Artificial Sequence: Synthetic oligonucleotide
  Description of Combined DNA/RNA Molecule: Synthetic oligonucleotide
tggaggccggagaaattaaactgacacacagaggccctacaucctt

SEQ ID NO: 5078 - DNA, 50 bp, Artificial Sequence
  Description of Artificial Sequence: Synthetic oligonucleotide
tccccacacaccttggttctcatcaggaggtttgggatctgggcatcaca

SEQ ID NO: 5079 - DNA, 30 bp, Artificial Sequence
  Description of Artificial Sequence: Synthetic probe
ttccctacatccccacacaccttggttctc

SEQ ID NO: 5080 - DNA, 21 bp, Artificial Sequence
  Description of Artificial Sequence: Synthetic primer
tggaggccggagaaattaaac

SEQ ID NO: 5081 - DNA, 21 bp, Artificial Sequence
  Description of Artificial Sequence: Synthetic primer
tgtgatgcccagatcccaaac

SEQ ID NO: 5082 - DNA, 47 bp, Artificial Sequence
  Description of Artificial Sequence: Synthetic primer
  Description of Combined DNA/RNA Molecule: Synthetic primer
tgtgatgcccagatcccaaactgctgaggaaggcagaaagatgcctt

SEQ ID NO: 5083 - DNA, 39 bp, Artificial Sequence
  Description of Artificial Sequence: Synthetic primer
  Description of Combined DNA/RNA Molecule: Synthetic primer
acgacgacgacgaacagggaactgcagccccacacacag

SEQ ID NO: 5084 - DNA, 39 bp, Artificial Sequence
  Description of Artificial Sequence: Synthetic primer
  Description of Combined DNA/RNA Molecule: Synthetic primer
acgacgacgacgaagcacacagcccacagggaacugcaa

SEQ ID NO: 5085 - DNA, 62 bp, Artificial Sequence
  Description of Artificial Sequence: Synthetic primer
  Description of Combined DNA/RNA Molecule: Synthetic primer
acgacgacgacttgacgaacataatggttgctgttgtcttttttccttgacttggaaatgtt

SEQ ID NO: 5086 - DNA, 52 bp, Artificial Sequence
  Description of Artificial Sequence: Synthetic oligonucleotide
  Description of Combined DNA/RNA Molecule: Synthetic oligonucleotide
ttgtctctgcgacccatcaacaacaagcacaacttagccttggcgcacactc

SEQ ID NO: 5087 - DNA, 46 bp, Artificial Sequence
  Description of Artificial Sequence: Synthetic oligonucleotide
caccttgccaccctgcttaccacaaccttggtacacgttcggcaca

SEQ ID NO: 5088 - DNA, 21 bp, Artificial Sequence
  Description of Artificial Sequence: Synthetic probe
aatggcgcacaccttgccacc

SEQ ID NO: 5089 - DNA, 20 bp, Artificial Sequence
  Description of Artificial Sequence: Synthetic primer
ttgtctctgcgacccatcaa

SEQ ID NO: 5090 - DNA, 19 bp, Artificial Sequence
  Description of Artificial Sequence: Synthetic primer
tgtgccgaacgtgtaccaa

SEQ ID NO: 5091 - DNA, 56 bp, Artificial Sequence
  Description of Artificial Sequence: Synthetic primer
  Description of Combined DNA/RNA Molecule: Synthetic primer
tgtgccgaacgtgtaccaagtcttttttccttgacttggaaatgtctggctgtggc

SEQ ID NO: 5092 - DNA, 45 bp, Artificial Sequence
  Description of Artificial Sequence: Synthetic primer
  Description of Combined DNA/RNA Molecule: Synthetic primer
acgacgacgacgaatgagaaagtgactcagcagctatccagagcc

SEQ ID NO: 5093 - DNA, 45 bp, Artificial Sequence
  Description of Artificial Sequence: Synthetic primer
  Description of Combined DNA/RNA Molecule: Synthetic primer
acgacgacgacgaaaaagtgactcagcagctatccagagcuctcc

SEQ ID NO: 5094 - DNA, 55 bp, Artificial Sequence
  Description of Artificial Sequence: Synthetic primer
  Description of Combined DNA/RNA Molecule: Synthetic primer
acgacgacgacttgacgaacataatgcaagtcctggtgtgtgtgaaccaaaccta

SEQ ID NO: 5095 - DNA, 52 bp, Artificial Sequence
  Description of Artificial Sequence: Synthetic oligonucleotide
  Description of Combined DNA/RNA Molecule: Synthetic oligonucleotide
tggataaactaagtccgcccacgccattctcctatggagccaactcaacctg

SEQ ID NO: 5096 - DNA, 46 bp, Artificial Sequence
  Description of Artificial Sequence: Synthetic oligonucleotide
acccactcaaagctgccccaggaacgtgactgagcgacgtctaaca

SEQ ID NO: 5097 - DNA, 27 bp, Artificial Sequence
  Description of Artificial Sequence: Synthetic probe
ttcaactcaacccactcaaagctgccc

SEQ ID NO: 5098 - DNA, 22 bp, Artificial Sequence
  Description of Artificial Sequence: Synthetic primer
tggataaactaagtccgcccac

SEQ ID NO: 5099 - DNA, 21 bp, Artificial Sequence
  Description of Artificial Sequence: Synthetic primer
tgttagacgtcgctcagtcac

SEQ ID NO: 5100 - DNA, 51 bp, Artificial Sequence
  Description of Artificial Sequence: Synthetic primer
  Description of Combined DNA/RNA Molecule: Synthetic primer
tgttagacgtcgctcagtcactgtgtgaaccaaacctgtggttcttgggac

SEQ ID NO: 5101 - DNA, 42 bp, Artificial Sequence
  Description of Artificial Sequence: Synthetic primer
  Description of Combined DNA/RNA Molecule: Synthetic primer
acgacgacgacgaaccaactacacagaggctggcacaccaat

SEQ ID NO: 5102 - DNA, 42 bp, Artificial Sequence
  Description of Artificial Sequence: Synthetic primer
  Description of Combined DNA/RNA Molecule: Synthetic primer
acgacgacgacgaagggcacagtcccaactacacagaggcta

SEQ ID NO: 5103 - DNA, 53 bp, Artificial Sequence
  Description of Artificial Sequence: Synthetic primer
  Description of Combined DNA/RNA Molecule: Synthetic primer
acgacgacgacttgacgaacataatgcatctaggtgaggttggtgtccutgta

SEQ ID NO: 5104 - DNA, 48 bp, Artificial Sequence
  Description of Artificial Sequence: Synthetic oligonucleotide
  Description of Combined DNA/RNA Molecule: Synthetic oligonucleotide
tcctgaattggccacaccacccaaccctccacacctcaccgcaccctt

SEQ ID NO: 5105 - DNA, 54 bp, Artificial Sequence
  Description of Artificial Sequence: Synthetic oligonucleotide
cccccatctccatccatgtacacacactcacacgtgactgagcgacgtctaaca

SEQ ID NO: 5106 - DNA, 24 bp, Artificial Sequence
  Description of Artificial Sequence: Synthetic probe
aacaccgcacccccatctccatcc

SEQ ID NO: 5107 - DNA, 20 bp, Artificial Sequence
  Description of Artificial Sequence: Synthetic primer
tcctgaattggccacaccac

SEQ ID NO: 5108 - DNA, 21 bp, Artificial Sequence
  Description of Artificial Sequence: Synthetic primer
tgttagacgtcgctcagtcac

SEQ ID NO: 5109 - DNA, 41 bp, Artificial Sequence
  Description of Artificial Sequence: Synthetic primer
  Description of Combined DNA/RNA Molecule: Synthetic primer
acgacgacgacgaatgtgggcacatggctaatggcaccctt

SEQ ID NO: 5110 - DNA, 40 bp, Artificial Sequence
  Description of Artificial Sequence: Synthetic primer
  Description of Combined DNA/RNA Molecule: Synthetic primer
acgacgacgacgaagcacagccatttgtgtgggcacatga

SEQ ID NO: 5111 - DNA, 55 bp, Artificial Sequence
  Description of Artificial Sequence: Synthetic primer
  Description of Combined DNA/RNA Molecule: Synthetic primer
acgacgacgacttgacgaacataattcatggactgcaaccctgctgaaacatgta

SEQ ID NO: 5112 - DNA, 62 bp, Artificial Sequence
  Description of Artificial Sequence: Synthetic oligonucleotide
  Description of Combined DNA/RNA Molecule: Synthetic oligonucleotide
ttcttgcggttctggaacacccctcttattaatgcattaattaatatcagggcagcagacca

SEQ ID NO: 5113 - DNA, 52 bp, Artificial Sequence
  Description of Artificial Sequence: Synthetic oligonucleotide
gactgcagaacagcagtgttttcagacacccgtgatgctccgttgttgctaa

SEQ ID NO: 5114 - DNA, 27 bp, Artificial Sequence
  Description of Artificial Sequence: Synthetic probe
ttggcagcagactgcagaacagcagtg

SEQ ID NO: 5115 - DNA, 20 bp, Artificial Sequence
  Description of Artificial Sequence: Synthetic primer
ttcttgcggttctggaacac

SEQ ID NO: 5116 - DNA, 21 bp, Artificial Sequence
  Description of Artificial Sequence: Synthetic primer
ttagcaacaacggagcatcac

SEQ ID NO: 5117 - DNA, 51 bp, Artificial Sequence
  Description of Artificial Sequence: Synthetic primer
  Description of Combined DNA/RNA Molecule: Synthetic primer
ttagcaacaacggagcatcacctgctgaaacatgtgtgaggtgtttgaaag

SEQ ID NO: 5118 - DNA, 48 bp, Artificial Sequence; identical to SEQ ID NO: 1057
  Description of Artificial Sequence: Synthetic primer
  Description of Combined DNA/RNA Molecule: Synthetic primer

SEQ ID NO: 5119 - DNA, 51 bp, Artificial Sequence; identical to SEQ ID NO: 1058
  Description of Artificial Sequence: Synthetic primer
  Description of Combined DNA/RNA Molecule: Synthetic primer

SEQ ID NO: 5120 - DNA, 45 bp, Artificial Sequence; identical to SEQ ID NO: 1059
  Description of Artificial Sequence: Synthetic oligonucleotide
  Description of Combined DNA/RNA Molecule: Synthetic oligonucleotide

SEQ ID NO: 5121 - DNA, 44 bp, Artificial Sequence; identical to SEQ ID NO: 1060
  Description of Artificial Sequence: Synthetic oligonucleotide

SEQ ID NO: 5122 - DNA, 27 bp, Artificial Sequence
  Description of Artificial Sequence: Synthetic probe
ttctccgcatccaggcaatcttccctg

SEQ ID NO: 5123 - DNA, 20 bp, Artificial Sequence
  Description of Artificial Sequence: Synthetic primer
tctacagctagatgcggcca

SEQ ID NO: 5124 - DNA, 20 bp, Artificial Sequence
  Description of Artificial Sequence: Synthetic primer
tcgacagagtaacggagcca

SEQ ID NO: 5125 - DNA, 45 bp, Artificial Sequence; identical to SEQ ID NO: 1064
  Description of Artificial Sequence: Synthetic primer
  Description of Combined DNA/RNA Molecule: Synthetic primer

SEQ ID NO: 5126 - DNA, 41 bp, Artificial Sequence; identical to SEQ ID NO: 1163
  Description of Artificial Sequence: Synthetic primer
  Description of Combined DNA/RNA Molecule: Synthetic primer

SEQ ID NO: 5127 - DNA, 41 bp, Artificial Sequence; identical to SEQ ID NO: 1164
  Description of Artificial Sequence: Synthetic primer
  Description of Combined DNA/RNA Molecule: Synthetic primer

SEQ ID NO: 5128 - DNA, 48 bp, Artificial Sequence; identical to SEQ ID NO: 1165
  Description of Artificial Sequence: Synthetic primer
  Description of Combined DNA/RNA Molecule: Synthetic primer

SEQ ID NO: 5129 - DNA, 45 bp, Artificial Sequence; identical to SEQ ID NO: 1166
  Description of Artificial Sequence: Synthetic oligonucleotide
  Description of Combined DNA/RNA Molecule: Synthetic oligonucleotide

SEQ ID NO: 5130 - DNA, 44 bp, Artificial Sequence; identical to SEQ ID NO: 1167
  Description of Artificial Sequence: Synthetic oligonucleotide

SEQ ID NO: 5131 - DNA, 24 bp, Artificial Sequence
  Description of Artificial Sequence: Synthetic probe
aagagctcagtcagcagccaggca

SEQ ID NO: 5132 - DNA, 20 bp, Artificial Sequence
  Description of Artificial Sequence: Synthetic primer
tttgcctcttgtaggtgcca

SEQ ID NO: 5133 - DNA, 19 bp, Artificial Sequence
  Description of Artificial Sequence: Synthetic primer
tgaatatccgcgttgccca

SEQ ID NO: 5134 - DNA, 42 bp, Artificial Sequence; identical to SEQ ID NO: 1171
  Description of Artificial Sequence: Synthetic primer
  Description of Combined DNA/RNA Molecule: Synthetic primer

SEQ ID NO: 5135 - DNA, 25 bp, Artificial Sequence
  Description of Artificial Sequence: Synthetic primer
  Description of Combined DNA/RNA Molecule: Synthetic primer
acgacgacgacttgacgaacataac

SEQ ID NO: 5136 - DNA, 42 bp, Artificial Sequence; identical to SEQ ID NO: 119
  Description of Artificial Sequence: Synthetic primer
  Description of Combined DNA/RNA Molecule: Synthetic primer

SEQ ID NO: 5137 - DNA, 40 bp, Artificial Sequence; identical to SEQ ID NO: 120
  Description of Artificial Sequence: Synthetic primer
  Description of Combined DNA/RNA Molecule: Synthetic primer

SEQ ID NO: 5138 - DNA, 48 bp, Artificial Sequence; identical to SEQ ID NO: 1298
  Description of Artificial Sequence: Synthetic primer
  Description of Combined DNA/RNA Molecule: Synthetic primer

SEQ ID NO: 5139 - DNA, 45 bp, Artificial Sequence; identical to SEQ ID NO: 1299
  Description of Artificial Sequence: Synthetic oligonucleotide
  Description of Combined DNA/RNA Molecule: Synthetic oligonucleotide

SEQ ID NO: 5140 - DNA, 49 bp, Artificial Sequence; identical to SEQ ID NO: 1300
  Description of Artificial Sequence: Synthetic oligonucleotide

SEQ ID NO: 5141 - DNA, 30 bp, Artificial Sequence; identical to SEQ ID NO: 1301
  Description of Artificial Sequence: Synthetic probe

SEQ ID NO: 5142 - DNA, 19 bp, Artificial Sequence
  Description of Artificial Sequence: Synthetic primer
tcgcaccggaattctgacc

SEQ ID NO: 5143 - DNA, 20 bp, Artificial Sequence
  Description of Artificial Sequence: Synthetic primer
tgccgtcatgggaaactacc

SEQ ID NO: 5144 - DNA, 44 bp, Artificial Sequence; identical to SEQ ID NO: 1304
  Description of Artificial Sequence: Synthetic primer
  Description of Combined DNA/RNA Molecule: Synthetic primer

SEQ ID NO: 5145 - DNA, 39 bp, Artificial Sequence; identical to SEQ ID NO: 1604
  Description of Artificial Sequence: Synthetic primer
  Description of Combined DNA/RNA Molecule: Synthetic primer

SEQ ID NO: 5146 - DNA, 39 bp, Artificial Sequence; identical to SEQ ID NO: 1605
  Description of Artificial Sequence: Synthetic primer
  Description of Combined DNA/RNA Molecule: Synthetic primer

SEQ ID NO: 5147 - DNA, 48 bp, Artificial Sequence; identical to SEQ ID NO: 1606
  Description of Artificial Sequence: Synthetic primer
  Description of Combined DNA/RNA Molecule: Synthetic primer

SEQ ID NO: 5148 - DNA, 47 bp, Artificial Sequence; identical to SEQ ID NO: 1607
  Description of Artificial Sequence: Synthetic oligonucleotide
  Description of Combined DNA/RNA Molecule: Synthetic oligonucleotide

SEQ ID NO: 5149 - DNA, 46 bp, Artificial Sequence; identical to SEQ ID NO: 1608
  Description of Artificial Sequence: Synthetic oligonucleotide

SEQ ID NO: 5150 - DNA, 28 bp, Artificial Sequence
  Description of Artificial Sequence: Synthetic probe
aattcctcatccctccacacacaccctg

SEQ ID NO: 5151 - DNA, 21 bp, Artificial Sequence
  Description of Artificial Sequence: Synthetic primer
tcacagagacttgccgatcac

SEQ ID NO: 5152 - DNA, 22 bp, Artificial Sequence
  Description of Artificial Sequence: Synthetic primer
tggccatgtctaagctacacac

SEQ ID NO: 5153 - DNA, 46 bp, Artificial Sequence; identical to SEQ ID NO: 1612
  Description of Artificial Sequence: Synthetic primer
  Description of Combined DNA/RNA Molecule: Synthetic primer

SEQ ID NO: 5154 - DNA, 46 bp, Artificial Sequence; identical to SEQ ID NO: 1613
  Description of Artificial Sequence: Synthetic primer
  Description of Combined DNA/RNA Molecule: Synthetic primer

SEQ ID NO: 5155 - DNA, 47 bp, Artificial Sequence; identical to SEQ ID NO: 1614
  Description of Artificial Sequence: Synthetic primer
  Description of Combined DNA/RNA Molecule: Synthetic primer

SEQ ID NO: 5156 - DNA, 54 bp, Artificial Sequence; identical to SEQ ID NO: 1615
  Description of Artificial Sequence: Synthetic primer
  Description of Combined DNA/RNA Molecule: Synthetic primer

SEQ ID NO: 5157 - DNA, 44 bp, Artificial Sequence; identical to SEQ ID NO: 1616
  Description of Artificial Sequence: Synthetic oligonucleotide
  Description of Combined DNA/RNA Molecule: Synthetic oligonucleotide

SEQ ID NO: 5158 - DNA, 40 bp, Artificial Sequence; identical to SEQ ID NO: 1617
  Description of Artificial Sequence: Synthetic oligonucleotide

SEQ ID NO: 5159 - DNA, 19 bp, Artificial Sequence
  Description of Artificial Sequence: Synthetic probe
ttacccccagcagccaccc

SEQ ID NO: 5160 - DNA, 19 bp, Artificial Sequence
  Description of Artificial Sequence: Synthetic primer
ttcgtccctgcacgctaac

SEQ ID NO: 5161 - DNA, 20 bp, Artificial Sequence
  Description of Artificial Sequence: Synthetic primer
tggcctaacggtgatggaac

SEQ ID NO: 5162 - DNA, 46 bp, Artificial Sequence; identical to SEQ ID NO: 1621
  Description of Artificial Sequence: Synthetic primer
  Description of Combined DNA/RNA Molecule: Synthetic primer

SEQ ID NO: 5163 - DNA, 45 bp, Artificial Sequence; identical to SEQ ID NO: 1799
  Description of Artificial Sequence: Synthetic primer
  Description of Combined DNA/RNA Molecule: Synthetic primer

SEQ ID NO: 5164 - DNA, 48 bp, Artificial Sequence; identical to SEQ ID NO: 1800
  Description of Artificial Sequence: Synthetic primer
  Description of Combined DNA/RNA Molecule: Synthetic primer

SEQ ID NO: 5165 - DNA, 55 bp, Artificial Sequence; identical to SEQ ID NO: 1801
  Description of Artificial Sequence: Synthetic primer
  Description of Combined DNA/RNA Molecule: Synthetic primer

SEQ ID NO: 5166 - DNA, 47 bp, Artificial Sequence; identical to SEQ ID NO: 1802
  Description of Artificial Sequence: Synthetic oligonucleotide
  Description of Combined DNA/RNA Molecule: Synthetic oligonucleotide

SEQ ID NO: 5167 - DNA, 49 bp, Artificial Sequence; identical to SEQ ID NO: 1803
  Description of Artificial Sequence: Synthetic oligonucleotide

SEQ ID NO: 5168 - DNA, 24 bp, Artificial Sequence
  Description of Artificial Sequence: Synthetic probe
ttggagacagccaggagaggcagc

SEQ ID NO: 5169 - DNA, 21 bp, Artificial Sequence
  Description of Artificial Sequence: Synthetic primer
taatctccagacctccgaacc

SEQ ID NO: 5170 - DNA, 22 bp, Artificial Sequence
  Description of Artificial Sequence: Synthetic primer
tgtcccgttcaatccttacacc

SEQ ID NO: 5171 - DNA, 48 bp, Artificial Sequence; identical to SEQ ID NO: 1807
  Description of Artificial Sequence: Synthetic primer
  Description of Combined DNA/RNA Molecule: Synthetic primer

SEQ ID NO: 5172 - DNA, 38 bp, Artificial Sequence
  Description of Artificial Sequence: Synthetic primer
  Description of Combined DNA/RNA Molecule: Synthetic primer
acgacgacgacgaagggaggctgcagggacacagggcc

SEQ ID NO: 5173 - DNA, 37 bp, Artificial Sequence
  Description of Artificial Sequence: Synthetic primer
  Description of Combined DNA/RNA Molecule: Synthetic primer
acgacgacgacgaagctgcagggacacagggcugcaa

SEQ ID NO: 5174 - DNA, 47 bp, Artificial Sequence
  Description of Artificial Sequence: Synthetic primer
  Description of Combined DNA/RNA Molecule: Synthetic primer
acgacgacgacttgacgaacataatgggctgtgtgctgaggcutggt

SEQ ID NO: 5175 - DNA, 46 bp, Artificial Sequence
  Description of Artificial Sequence: Synthetic oligonucleotide
  Description of Combined DNA/RNA Molecule: Synthetic oligonucleotide
tatggactgtaccagcccaagcagagagcagcagtggcgcagagtg

SEQ ID NO: 5176 - DNA, 49 bp, Artificial Sequence
  Description of Artificial Sequence: Synthetic oligonucleotide
gagcacacagctggaagcaaaagcaggcttgaaactgaggcggtgttca

SEQ ID NO: 5177 - DNA, 22 bp, Artificial Sequence
  Description of Artificial Sequence: Synthetic probe
tttggcgcagagcacacagctg

SEQ ID NO: 5178 - DNA, 20 bp, Artificial Sequence
  Description of Artificial Sequence: Synthetic primer
tatggactgtaccagcccaa

SEQ ID NO: 5179 - DNA, 21 bp, Artificial Sequence
  Description of Artificial Sequence: Synthetic primer
tgaacaccgcctcagtttcaa

SEQ ID NO: 5180 - DNA, 48 bp, Artificial Sequence
  Description of Artificial Sequence: Synthetic primer
  Description of Combined DNA/RNA Molecule: Synthetic primer
tgaacaccgcctcagtttcaacttggccacactgcctgcttctgcttt

SEQ ID NO: 5181 - DNA, 38 bp, Artificial Sequence
  Description of Artificial Sequence: Synthetic primer
  Description of Combined DNA/RNA Molecule: Synthetic primer
acgacgacgacgaagtggcaagagaggcccacaggaga

SEQ ID NO: 5182 - DNA, 42 bp, Artificial Sequence
  Description of Artificial Sequence: Synthetic primer
  Description of Combined DNA/RNA Molecule: Synthetic primer
acgacgacgacgaagagagctgcacatctgtgtggcaagaga

SEQ ID NO: 5183 - DNA, 53 bp, Artificial Sequence
  Description of Artificial Sequence: Synthetic primer
  Description of Combined DNA/RNA Molecule: Synthetic primer
acgacgacgacttgacgaacataatggtgtggctggtgactttgtggtgtgag

SEQ ID NO: 5184 - DNA, 45 bp, Artificial Sequence
  Description of Artificial Sequence: Synthetic oligonucleotide
  Description of Combined DNA/RNA Molecule: Synthetic oligonucleotide
tttgcctcttgtaggtgccaagggcaatgccaccagcccagtctt

SEQ ID NO: 5185 - DNA, 49 bp, Artificial Sequence
  Description of Artificial Sequence: Synthetic oligonucleotide
gtcccattatcccaagcacaaccagctgcatgggcaacgcggatattca

SEQ ID NO: 5186 - DNA, 28 bp, Artificial Sequence
  Description of Artificial Sequence: Synthetic probe
ttcagcccagtcccattatcccaagcac

SEQ ID NO: 5187 - DNA, 20 bp, Artificial Sequence
  Description of Artificial Sequence: Synthetic primer
tttgcctcttgtaggtgcca

SEQ ID NO: 5188 - DNA, 19 bp, Artificial Sequence
  Description of Artificial Sequence: Synthetic primer
tgaatatccgcgttgccca

SEQ ID NO: 5189 - DNA, 49 bp, Artificial Sequence
  Description of Artificial Sequence: Synthetic primer
  Description of Combined DNA/RNA Molecule: Synthetic primer
tgaatatccgcgttgcccagtgactttgtggtgtgaatgcagttggtta

SEQ ID NO: 5190 - DNA, 38 bp, Artificial Sequence
  Description of Artificial Sequence: Synthetic primer
  Description of Combined DNA/RNA Molecule: Synthetic primer
acgacgacgacgaagctcccaggccacagctcauttgt

SEQ ID NO: 5191 - DNA, 40 bp, Artificial Sequence
  Description of Artificial Sequence: Synthetic primer
  Description of Combined DNA/RNA Molecule: Synthetic primer
acgacgacgacgaacccaggccacagctcatttgcatttt

SEQ ID NO: 5192 - DNA, 54 bp, Artificial Sequence
  Description of Artificial Sequence: Synthetic primer
  Description of Combined DNA/RNA Molecule: Synthetic primer
acgacgacgacttgacgaacataatcattgtgggctctggaaatgaggcgtgga

SEQ ID NO: 5193 - DNA, 45 bp, Artificial Sequence
  Description of Artificial Sequence: Synthetic oligonucleotide
  Description of Combined DNA/RNA Molecule: Synthetic oligonucleotide
tgtcgcccggtagcaataaacaggcagtcccagcaagacaggaaa

SEQ ID NO: 5194 - DNA, 42 bp, Artificial Sequence
  Description of Artificial Sequence: Synthetic oligonucleotide
ggaggagccagggcagaggggtttccgcgatctttgcattca

SEQ ID NO: 5195 - DNA, 23 bp, Artificial Sequence
  Description of Artificial Sequence: Synthetic probe
ttcaagacaggaggagccagggc

SEQ ID NO: 5196 - DNA, 21 bp, Artificial Sequence
  Description of Artificial Sequence: Synthetic primer
tgtcgcccggtagcaataaac

SEQ ID NO: 5197 - DNA, 22 bp, Artificial Sequence
  Description of Artificial Sequence: Synthetic primer
tgaatgcaaagatcgcggaaac

SEQ ID NO: 5198 - DNA, 43 bp, Artificial Sequence
  Description of Artificial Sequence: Synthetic primer
  Description of Combined DNA/RNA Molecule: Synthetic primer
tgaatgcaaagatcgcggaaacgctggaggtgaggagatgtta

SEQ ID NO: 5199 - DNA, 37 bp, Artificial Sequence
  Description of Artificial Sequence: Synthetic primer
  Description of Combined DNA/RNA Molecule: Synthetic primer
acgacgacgacgaacacctcccacaccccccaggact

SEQ ID NO: 5200 - DNA, 38 bp, Artificial Sequence
  Description of Artificial Sequence: Synthetic primer
  Description of Combined DNA/RNA Molecule: Synthetic primer
acgacgacgacgaactcccacaccccccaggacccctc

SEQ ID NO: 5201 - DNA, 54 bp, Artificial Sequence
  Description of Artificial Sequence: Synthetic primer
  Description of Combined DNA/RNA Molecule: Synthetic primer
acgacgacgacttgacgaacataataaatcacccctgtgcttccttcacucctc

SEQ ID NO: 5202 - DNA, 46 bp, Artificial Sequence
  Description of Artificial Sequence: Synthetic oligonucleotide
  Description of Combined DNA/RNA Molecule: Synthetic oligonucleotide
tgtgcactagtccacgtgaaaccctgcctgcaacagggacaagacg

SEQ ID NO: 5203 - DNA, 55 bp, Artificial Sequence
  Description of Artificial Sequence: Synthetic oligonucleotide
agatagatgattccacaggccctcaccaacctcgtttccgcgatctttgcattca

SEQ ID NO: 5204 - DNA, 31 bp, Artificial Sequence
  Description of Artificial Sequence: Synthetic probe
ttagggacaagatagatgattccacaggccc

SEQ ID NO: 5205 - DNA, 22 bp, Artificial Sequence
  Description of Artificial Sequence: Synthetic primer
tgtgcactagtccacgtgaaac

SEQ ID NO: 5206 - DNA, 22 bp, Artificial Sequence
  Description of Artificial Sequence: Synthetic primer
tgaatgcaaagatcgcggaaac

SEQ ID NO: 5207 - DNA, 52 bp, Artificial Sequence
  Description of Artificial Sequence: Synthetic primer
  Description of Combined DNA/RNA Molecule: Synthetic primer
tgaatgcaaagatcgcggaaaccactccttccttagagctggaggctggtgg

SEQ ID NO: 5208 - DNA, 37 bp, Artificial Sequence
  Description of Artificial Sequence: Synthetic primer
  Description of Combined DNA/RNA Molecule: Synthetic primer
acgacgacgacgaagcacaggccacactgccaccaga

SEQ ID NO: 5209 - DNA, 41 bp, Artificial Sequence
  Description of Artificial Sequence: Synthetic primer
  Description of Combined DNA/RNA Molecule: Synthetic primer
acgacgacgacgaatacacagcacaggccacactgccaccg

SEQ ID NO: 5210 - DNA, 51 bp, Artificial Sequence
  Description of Artificial Sequence: Synthetic primer
  Description of Combined DNA/RNA Molecule: Synthetic primer
acgacgacgacttgacgaacataatgaggttgttggaggctgggttgggta

SEQ ID NO: 5211 - DNA, 46 bp, Artificial Sequence
  Description of Artificial Sequence: Synthetic oligonucleotide
  Description of Combined DNA/RNA Molecule: Synthetic oligonucleotide
tacagatacggacgggaatcaagcctccaccaccaccatcaccctt

SEQ ID NO: 5212 - DNA, 41 bp, Artificial Sequence
  Description of Artificial Sequence: Synthetic oligonucleotide
cccccaccacccacctgccttgtttacatcctcctgcgtca

SEQ ID NO: 5213 - DNA, 22 bp, Artificial Sequence
  Description of Artificial Sequence: Synthetic probe
ttaccatcacccccaccaccca

SEQ ID NO: 5214 - DNA, 22 bp, Artificial Sequence
  Description of Artificial Sequence: Synthetic primer
tacagatacggacgggaatcaa

SEQ ID NO: 5215 - DNA, 22 bp, Artificial Sequence
  Description of Artificial Sequence: Synthetic primer
tgacgcaggaggatgtaaacaa

SEQ ID NO: 5216 - DNA, 49 bp, Artificial Sequence
  Description of Artificial Sequence: Synthetic primer
  Description of Combined DNA/RNA Molecule: Synthetic primer
tgacgcaggaggatgtaaacaagctgggttgggtgacaactgatggcaa

SEQ ID NO: 5217 - DNA, 38 bp, Artificial Sequence
  Description of Artificial Sequence: Synthetic primer
  Description of Combined DNA/RNA Molecule: Synthetic primer
acgacgacgacgaagccagagccattggccacacctaa

SEQ ID NO: 5218 - DNA, 39 bp, Artificial Sequence
  Description of Artificial Sequence: Synthetic primer
  Description of Combined DNA/RNA Molecule: Synthetic primer
acgacgacgacgaaccagagccattggccacaccuagcg

SEQ ID NO: 5219 - DNA, 51 bp, Artificial Sequence
  Description of Artificial Sequence: Synthetic primer
  Description of Combined DNA/RNA Molecule: Synthetic primer
acgacgacgacttgacgaacataatctgctgccctggctgtaggacatgga

SEQ ID NO: 5220 - DNA, 49 bp, Artificial Sequence
  Description of Artificial Sequence: Synthetic oligonucleotide
  Description of Combined DNA/RNA Molecule: Synthetic oligonucleotide
ttggcgcaacggtttccaaaacacctcatgtatgcagcacttcauagtc

SEQ ID NO: 5221 - DNA, 45 bp, Artificial Sequence
  Description of Artificial Sequence: Synthetic oligonucleotide
tagctgcaggcaccaccaccacattgtttacatcctcctgcgtca

SEQ ID NO: 5222 - DNA, 28 bp, Artificial Sequence
  Description of Artificial Sequence: Synthetic probe
ttcacttcatagctgcaggcaccaccac

SEQ ID NO: 5223 - DNA, 19 bp, Artificial Sequence
  Description of Artificial Sequence: Synthetic primer
ttggcgcaacggtttccaa

SEQ ID NO: 5224 - DNA, 22 bp, Artificial Sequence
  Description of Artificial Sequence: Synthetic primer
tgacgcaggaggatgtaaacaa

SEQ ID NO: 5225 - DNA, 53 bp, Artificial Sequence
  Description of Artificial Sequence: Synthetic primer
  Description of Combined DNA/RNA Molecule: Synthetic primer
tgacgcaggaggatgtaaacaataggacatgggataagaggctgctatggtga

SEQ ID NO: 5226 - DNA, 45 bp, Artificial Sequence; identical to SEQ ID NO: 363
  Description of Artificial Sequence: Synthetic primer
  Description of Combined DNA/RNA Molecule: Synthetic primer

SEQ ID NO: 5227 - DNA, 48 bp, Artificial Sequence
  Description of Artificial Sequence: Synthetic primer
  Description of Combined DNA/RNA Molecule: Synthetic primer
acgacgacgacttgacgaacataatgtgggtgtgggcagcctggtggg

SEQ ID NO: 5228 - DNA, 51 bp, Artificial Sequence
  Description of Artificial Sequence: Synthetic oligonucleotide
  Description of Combined DNA/RNA Molecule: Synthetic oligonucleotide
ttcagcagcctggcatcacgttgcagttgagctgctcaaattcgcagaagg

SEQ ID NO: 5229 - DNA, 50 bp, Artificial Sequence
  Description of Artificial Sequence: Synthetic oligonucleotide
gaaaacagtgcacaccaggttgaggaagtacgtggagcgctaaggttgca

SEQ ID NO: 5230 - DNA, 31 bp, Artificial Sequence
  Description of Artificial Sequence: Synthetic probe
ttattcgcagaaaacagtgcacaccaggttg

SEQ ID NO: 5231 - DNA, 19 bp, Artificial Sequence
  Description of Artificial Sequence: Synthetic primer
ttcagcagcctggcatcac

SEQ ID NO: 5232 - DNA, 19 bp, Artificial Sequence
  Description of Artificial Sequence: Synthetic primer
tgcaaccttagcgctccac

SEQ ID NO: 5233 - DNA, 43 bp, Artificial Sequence
  Description of Artificial Sequence: Synthetic primer
  Description of Combined DNA/RNA Molecule: Synthetic primer
tgcaaccttagcgctccactgtgggcagcctggtgggtgtgac

SEQ ID NO: 5234 - DNA, 40 bp, Artificial Sequence
  Description of Artificial Sequence: Synthetic primer
  Description of Combined DNA/RNA Molecule: Synthetic primer
acgacgacgacgaacacacaccaaggcacagcccacacct

SEQ ID NO: 5235 - DNA, 39 bp, Artificial Sequence
  Description of Artificial Sequence: Synthetic primer
  Description of Combined DNA/RNA Molecule: Synthetic primer
acgacgacgacgaacaccaaggcacagcccacacccccg

SEQ ID NO: 5236 - DNA, 53 bp, Artificial Sequence
  Description of Artificial Sequence: Synthetic primer
  Description of Combined DNA/RNA Molecule: Synthetic primer
acgacgacgacttgacgaacataatggactatctcctggagggtgctaugggc

SEQ ID NO: 5237 - DNA, 46 bp, Artificial Sequence
  Description of Artificial Sequence: Synthetic oligonucleotide
  Description of Combined DNA/RNA Molecule: Synthetic oligonucleotide
ttgttcgcccgttggtcacccagtaggctgagagggcatcagggct

SEQ ID NO: 5238 - DNA, 46 bp, Artificial Sequence
  Description of Artificial Sequence: Synthetic oligonucleotide
gggacccacactgagagtcaaggcagcgtggagcgctaaggttgca

SEQ ID NO: 5239 - DNA, 28 bp, Artificial Sequence
  Description of Artificial Sequence: Synthetic probe
ttggcatcagggacccacactgagagtc

SEQ ID NO: 5240 - DNA, 19 bp, Artificial Sequence
  Description of Artificial Sequence: Synthetic primer
ttgttcgcccgttggtcac

SEQ ID NO: 5241 - DNA, 19 bp, Artificial Sequence
  Description of Artificial Sequence: Synthetic primer
tgcaaccttagcgctccac

SEQ ID NO: 5242 - DNA, 47 bp, Artificial Sequence
  Description of Artificial Sequence: Synthetic primer
  Description of Combined DNA/RNA Molecule: Synthetic primer
tgcaaccttagcgctccacggaggtgctatgggtagggaaatgggat

SEQ ID NO: 5243 - DNA, 37 bp, Artificial Sequence
  Description of Artificial Sequence: Synthetic primer
  Description of Combined DNA/RNA Molecule: Synthetic primer
acgacgacgacgaactggctgggcacacagcagtgcc

SEQ ID NO: 5244 - DNA, 38 bp, Artificial Sequence
  Description of Artificial Sequence: Synthetic primer
  Description of Combined DNA/RNA Molecule: Synthetic primer
acgacgacgacgaagctgggcacacagcagtgcugagt

SEQ ID NO: 5245 - DNA, 53 bp, Artificial Sequence
  Description of Artificial Sequence: Synthetic primer
  Description of Combined DNA/RNA Molecule: Synthetic primer
acgacgacgacttgacgaacataatgtgtggttcttgccaatgcagcagcccc

SEQ ID NO: 5246 - DNA, 46 bp, Artificial Sequence
  Description of Artificial Sequence: Synthetic oligonucleotide
  Description of Combined DNA/RNA Molecule: Synthetic oligonucleotide
tatcgcatcaaatggagagcaagaggcagcagcactgaacaggtaa

SEQ ID NO: 5247 - DNA, 43 bp, Artificial Sequence
  Description of Artificial Sequence: Synthetic oligonucleotide
ggtggagctgcagcacagcagttgaccgctgttatacgttgca

SEQ ID NO: 5248 - DNA, 23 bp, Artificial Sequence
  Description of Artificial Sequence: Synthetic probe
ttctgaacaggtggagctgcagc

SEQ ID NO: 5249 - DNA, 22 bp, Artificial Sequence
  Description of Artificial Sequence: Synthetic primer
tatcgcatcaaatggagagcaa

SEQ ID NO: 5250 - DNA, 22 bp, Artificial Sequence
  Description of Artificial Sequence: Synthetic primer
tgcaacgtataacagcggtcaa

SEQ ID NO: 5251 - DNA, 50 bp, Artificial Sequence
  Description of Artificial Sequence: Synthetic primer
  Description of Combined DNA/RNA Molecule: Synthetic primer
tgcaacgtataacagcggtcaagccctcctgctatatagcctgttgtgcc

SEQ ID NO: 5252 - DNA, 37 bp, Artificial Sequence
  Description of Artificial Sequence: Synthetic primer
  Description of Combined DNA/RNA Molecule: Synthetic primer
acgacgacgacgaagcagtgagggcagcagcagctcg

SEQ ID NO: 5253 - DNA, 37 bp, Artificial Sequence
  Description of Artificial Sequence: Synthetic primer
  Description of Combined DNA/RNA Molecule: Synthetic primer
acgacgacgacgaagccagcagtgagggcagcagcaa

SEQ ID NO: 5254 - DNA, 50 bp, Artificial Sequence
  Description of Artificial Sequence: Synthetic primer
  Description of Combined DNA/RNA Molecule: Synthetic primer
acgacgacgacttgacgaacataatctggagctggaggtggctgauggta

SEQ ID NO: 5255 - DNA, 50 bp, Artificial Sequence
  Description of Artificial Sequence: Synthetic oligonucleotide
  Description of Combined DNA/RNA Molecule: Synthetic oligonucleotide
tcctagtacctacagtgggcaagctcatagcagtcacagccatcaccatt

SEQ ID NO: 5256 - DNA, 46 bp, Artificial Sequence
  Description of Artificial Sequence: Synthetic oligonucleotide
ccaccacagccaccttgaggcaggttgaccgctgttatacgttgca

SEQ ID NO: 5257 - DNA, 25 bp, Artificial Sequence
  Description of Artificial Sequence: Synthetic probe
ttgccatcaccaccacagccacctt

SEQ ID NO: 5258 - DNA, 22 bp, Artificial Sequence
  Description of Artificial Sequence: Synthetic primer
tcctagtacctacagtgggcaa

SEQ ID NO: 5259 - DNA, 22 bp, Artificial Sequence
  Description of Artificial Sequence: Synthetic primer
tgcaacgtataacagcggtcaa

SEQ ID NO: 5260 - DNA, 45 bp, Artificial Sequence
  Description of Artificial Sequence: Synthetic primer
  Description of Combined DNA/RNA Molecule: Synthetic primer
tgcaacgtataacagcggtcaatgatggtggagaggccttgcctt

SEQ ID NO: 5261 - DNA, 40 bp, Artificial Sequence
  Description of Artificial Sequence: Synthetic primer
  Description of Combined DNA/RNA Molecule: Synthetic primer
acgacgacgacgaaggttcagctgctttggaggcacagcg

SEQ ID NO: 5262 - DNA, 45 bp, Artificial Sequence
  Description of Artificial Sequence: Synthetic primer
  Description of Combined DNA/RNA Molecule: Synthetic primer
acgacgacgacgaagcagtgagcaagtatcagggttcagcugctc

SEQ ID NO: 5263 - DNA, 53 bp, Artificial Sequence
  Description of Artificial Sequence: Synthetic primer
  Description of Combined DNA/RNA Molecule: Synthetic primer
acgacgacgacttgacgaacataatggccaaatggtctcctgctggaaggaaa

SEQ ID NO: 5264 - DNA, 43 bp, Artificial Sequence
  Description of Artificial Sequence: Synthetic oligonucleotide
  Description of Combined DNA/RNA Molecule: Synthetic oligonucleotide
tagacacgagcgaggtcaccagcagttgcagcaggtcagcaaa

SEQ ID NO: 5265 - DNA, 41 bp, Artificial Sequence
  Description of Artificial Sequence: Synthetic oligonucleotide
gcaggcccagggaagcaggcgtgcaaaattcaggctgtgca

SEQ ID NO: 5266 - DNA, 24 bp, Artificial Sequence
  Description of Artificial Sequence: Synthetic probe
ttcaggtcagcaggcccagggaag

SEQ ID NO: 5267 - DNA, 19 bp, Artificial Sequence
  Description of Artificial Sequence: Synthetic primer
tagacacgagcgaggtcac

SEQ ID NO: 5268 - DNA, 21 bp, Artificial Sequence
  Description of Artificial Sequence: Synthetic primer
tgcacagcctgaattttgcac

SEQ ID NO: 5269 - DNA, 46 bp, Artificial Sequence
  Description of Artificial Sequence: Synthetic primer
  Description of Combined DNA/RNA Molecule: Synthetic primer
tgcacagcctgaattttgcactctctgagtggccactgcttgcttt

SEQ ID NO: 5270 - DNA, 39 bp, Artificial Sequence
  Description of Artificial Sequence: Synthetic primer
  Description of Combined DNA/RNA Molecule: Synthetic primer
acgacgacgacgaagccaggtgcagtggctcacagggct

SEQ ID NO: 5271 - DNA, 37 bp, Artificial Sequence
  Description of Artificial Sequence: Synthetic primer
  Description of Combined DNA/RNA Molecule: Synthetic primer
acgacgacgacgaagcagtggctcacagggcccctgg

SEQ ID NO: 5272 - DNA, 55 bp, Artificial Sequence
  Description of Artificial Sequence: Synthetic primer
  Description of Combined DNA/RNA Molecule: Synthetic primer
acgacgacgacttgacgaacataatctaatgtgactgctgtgcctcaggcuggac

SEQ ID NO: 5273 - DNA, 49 bp, Artificial Sequence
  Description of Artificial Sequence: Synthetic oligonucleotide
  Description of Combined DNA/RNA Molecule: Synthetic oligonucleotide
ttcttcacagtaccgccacattgtctgaaggttgcactggcgcacacgg

SEQ ID NO: 5274 - DNA, 48 bp, Artificial Sequence
  Description of Artificial Sequence: Synthetic oligonucleotide
cacaacttccaggacagaggctgtggctgtgtgttgtctggtggtgca

SEQ ID NO: 5275 - DNA, 26 bp, Artificial Sequence
  Description of Artificial Sequence: Synthetic probe
tttggcgcacacaacttccaggacag

SEQ ID NO: 5276 - DNA, 20 bp, Artificial Sequence
  Description of Artificial Sequence: Synthetic primer
ttcttcacagtaccgccaca

SEQ ID NO: 5277 - DNA, 19 bp, Artificial Sequence
  Description of Artificial Sequence: Synthetic primer
tgcaccaccagacaacaca

SEQ ID NO: 5278 - DNA, 45 bp, Artificial Sequence
  Description of Artificial Sequence: Synthetic primer
  Description of Combined DNA/RNA Molecule: Synthetic primer
tgcaccaccagacaacacagtgactgctgtgcctcaggttggaga

SEQ ID NO: 5279 - DNA, 38 bp, Artificial Sequence
  Description of Artificial Sequence: Synthetic primer
  Description of Combined DNA/RNA Molecule: Synthetic primer
acgacgacgacgaagcacacagcagagcccccaaggaa

SEQ ID NO: 5280 - DNA, 39 bp, Artificial Sequence
  Description of Artificial Sequence: Synthetic primer
  Description of Combined DNA/RNA Molecule: Synthetic primer
acgacgacgacgaacacagcagagcccccaaggagcagt

SEQ ID NO: 5281 - DNA, 46 bp, Artificial Sequence
  Description of Artificial Sequence: Synthetic primer
  Description of Combined DNA/RNA Molecule: Synthetic primer
acgacgacgacttgacgaacataatggcctgaggctgtggcugcaa

SEQ ID NO: 5282 - DNA, 43 bp, Artificial Sequence
  Description of Artificial Sequence: Synthetic oligonucleotide
  Description of Combined DNA/RNA Molecule: Synthetic oligonucleotide
taccctcctagctccgtacagaggccatggcagggccagggtg

SEQ ID NO: 5283 - DNA, 41 bp, Artificial Sequence
  Description of Artificial Sequence: Synthetic oligonucleotide
gggcacaggagctgagcactgctgtgttgtctggtggtgca

SEQ ID NO: 5284 - DNA, 20 bp, Artificial Sequence
  Description of Artificial Sequence: Synthetic probe
ttagggccagggcacaggag

SEQ ID NO: 5285 - DNA, 20 bp, Artificial Sequence
  Description of Artificial Sequence: Synthetic primer
taccctcctagctccgtaca

SEQ ID NO: 5286 - DNA, 19 bp, Artificial Sequence
  Description of Artificial Sequence: Synthetic primer
tgcaccaccagacaacaca

SEQ ID NO: 5287 - DNA, 41 bp, Artificial Sequence
  Description of Artificial Sequence: Synthetic primer
  Description of Combined DNA/RNA Molecule: Synthetic primer
tgcaccaccagacaacacagaggctgtggctgcaatgctcg

SEQ ID NO: 5288 - DNA, 48 bp, Artificial Sequence
  Description of Artificial Sequence: Synthetic primer
  Description of Combined DNA/RNA Molecule: Synthetic primer
acgacgacgacgaacataggacaggaaaggcatgtagtacacagccaa

SEQ ID NO: 5289 - DNA, 46 bp, Artificial Sequence
  Description of Artificial Sequence: Synthetic primer
  Description of Combined DNA/RNA Molecule: Synthetic primer
acgacgacgacgaagacaggaaaggcatgtagtacacagccaggtc

SEQ ID NO: 5290 - DNA, 52 bp, Artificial Sequence
  Description of Artificial Sequence: Synthetic primer
  Description of Combined DNA/RNA Molecule: Synthetic primer
acgacgacgacttgacgaacataatgagtgtgtggtcctgggatggcuctat

SEQ ID NO: 5291 - DNA, 47 bp, Artificial Sequence
  Description of Artificial Sequence: Synthetic oligonucleotide
  Description of Combined DNA/RNA Molecule: Synthetic oligonucleotide
tcatcgccctcagatcttccaggttctgcaggctgctcttcagcaaa

SEQ ID NO: 5292 - DNA, 50 bp, Artificial Sequence
  Description of Artificial Sequence: Synthetic oligonucleotide
gcaggtagcacaccttgtcctgaggcacatggaggatagattggagggca

SEQ ID NO: 5293 - DNA, 29 bp, Artificial Sequence
  Description of Artificial Sequence: Synthetic probe
aactcttcagcaggtagcacaccttgtcc

SEQ ID NO: 5294 - DNA, 21 bp, Artificial Sequence
  Description of Artificial Sequence: Synthetic primer
tcatcgccctcagatcttcca

SEQ ID NO: 5295 - DNA, 21 bp, Artificial Sequence
  Description of Artificial Sequence: Synthetic primer
tgccctccaatctatcctcca

SEQ ID NO: 5296 - DNA, 47 bp, Artificial Sequence
  Description of Artificial Sequence: Synthetic primer
  Description of Combined DNA/RNA Molecule: Synthetic primer
tgccctccaatctatcctccactaccctggccaagtgaggttgtgct

SEQ ID NO: 5297 - DNA, 41 bp, Artificial Sequence
  Description of Artificial Sequence: Synthetic primer
  Description of Combined DNA/RNA Molecule: Synthetic primer
acgacgacgacgaacctggaggcctccagacaatcagaagc

SEQ ID NO: 5298 - DNA, 42 bp, Artificial Sequence
  Description of Artificial Sequence: Synthetic primer
  Description of Combined DNA/RNA Molecule: Synthetic primer
acgacgacgacgaatggaggcctccagacaatcagaagtgat

SEQ ID NO: 5299 - DNA, 51 bp, Artificial Sequence
  Description of Artificial Sequence: Synthetic primer
  Description of Combined DNA/RNA Molecule: Synthetic primer
acgacgacgacttgacgaacataatgtggccagcctagtggatggagaacc

SEQ ID NO: 5300 - DNA, 45 bp, Artificial Sequence
  Description of Artificial Sequence: Synthetic oligonucleotide
  Description of Combined DNA/RNA Molecule: Synthetic oligonucleotide
taaccagttaccaccgccagcatccaggtccatgaggtcagggac

SEQ ID NO: 5301 - DNA, 46 bp, Artificial Sequence
  Description of Artificial Sequence: Synthetic oligonucleotide
ggagtcagcccaccctaagactccctggaggatagattggagggca

SEQ ID NO: 5302 - DNA, 23 bp, Artificial Sequence
  Description of Artificial Sequence: Synthetic probe
ccgaggtcaggagtcagcccacc

SEQ ID NO: 5303 - DNA, 19 bp, Artificial Sequence
  Description of Artificial Sequence: Synthetic primer
taaccagttaccaccgcca

SEQ ID NO: 5304 - DNA, 21 bp, Artificial Sequence
  Description of Artificial Sequence: Synthetic primer
tgccctccaatctatcctcca

SEQ ID NO: 5305 - DNA, 49 bp, Artificial Sequence
  Description of Artificial Sequence: Synthetic primer
  Description of Combined DNA/RNA Molecule: Synthetic primer
tgccctccaatctatcctccagccagcctagtggatggagaattgggat

SEQ ID NO: 5306 - DNA, 40 bp, Artificial Sequence
  Description of Artificial Sequence: Synthetic primer
  Description of Combined DNA/RNA Molecule: Synthetic primer
acgacgacgacgaacaatgtgaggaggcctgcacagggat

SEQ ID NO: 5307 - DNA, 40 bp, Artificial Sequence
  Description of Artificial Sequence: Synthetic primer
  Description of Combined DNA/RNA Molecule: Synthetic primer
acgacgacgacgaaggagggtgttcccagctccaaugtga

SEQ ID NO: 5308 - DNA, 51 bp, Artificial Sequence
  Description of Artificial Sequence: Synthetic primer
  Description of Combined DNA/RNA Molecule: Synthetic primer
acgacgacgacttgacgaacataatcccagggatcctgcatctggccctgt

SEQ ID NO: 5309 - DNA, 50 bp, Artificial Sequence
  Description of Artificial Sequence: Synthetic oligonucleotide
  Description of Combined DNA/RNA Molecule: Synthetic oligonucleotide
tcgcaccggaattctgaccgggactaggttctcaagaggcaaacaggcgt

SEQ ID NO: 5310 - DNA, 47 bp, Artificial Sequence
  Description of Artificial Sequence: Synthetic oligonucleotide
ggcacaccagagaacccaagactgctgggtagtttcccatgacggca

SEQ ID NO: 5311 - DNA, 28 bp, Artificial Sequence
  Description of Artificial Sequence: Synthetic probe
ttgcaaacaggcacaccagagaacccaa

SEQ ID NO: 5312 - DNA, 19 bp, Artificial Sequence
  Description of Artificial Sequence: Synthetic primer
tcgcaccggaattctgacc

SEQ ID NO: 5313 - DNA, 20 bp, Artificial Sequence
  Description of Artificial Sequence: Synthetic primer
tgccgtcatgggaaactacc

SEQ ID NO: 5314 - DNA, 45 bp, Artificial Sequence
  Description of Artificial Sequence: Synthetic primer
  Description of Combined DNA/RNA Molecule: Synthetic primer
tgccgtcatgggaaactaccgggatcctgcatctggccttgcagt

SEQ ID NO: 5315 - DNA, 39 bp, Artificial Sequence
  Description of Artificial Sequence: Synthetic primer
  Description of Combined DNA/RNA Molecule: Synthetic primer
acgacgacgacgaagcaggctgctggaagacccaggccc

SEQ ID NO: 5316 - DNA, 39 bp, Artificial Sequence
  Description of Artificial Sequence: Synthetic primer
  Description of Combined DNA/RNA Molecule: Synthetic primer
acgacgacgacgaagctgctggaagacccaggccuttct

SEQ ID NO: 5317 - DNA, 50 bp, Artificial Sequence
  Description of Artificial Sequence: Synthetic primer
  Description of Combined DNA/RNA Molecule: Synthetic primer
acgacgacgacttgacgaacataatgagcctggaggcccagtgaaaccaa

SEQ ID NO: 5318 - DNA, 51 bp, Artificial Sequence
  Description of Artificial Sequence: Synthetic oligonucleotide
  Description of Combined DNA/RNA Molecule: Synthetic oligonucleotide
ttgcacgttgtcctgcacccactttgagttcagttgagccccagcaccaca

SEQ ID NO: 5319 - DNA, 51 bp, Artificial Sequence
  Description of Artificial Sequence: Synthetic oligonucleotide
ccatgtgcctcaaccataacctcaaaccaggggtagtttcccatgacggca

SEQ ID NO: 5320 - DNA, 29 bp, Artificial Sequence
  Description of Artificial Sequence: Synthetic probe
ttcccagcaccatgtgcctcaaccataac

SEQ ID NO: 5321 - DNA, 19 bp, Artificial Sequence
  Description of Artificial Sequence: Synthetic primer
ttgcacgttgtcctgcacc

SEQ ID NO: 5322 - DNA, 20 bp, Artificial Sequence
  Description of Artificial Sequence: Synthetic primer
tgccgtcatgggaaactacc

SEQ ID NO: 5323 - DNA, 44 bp, Artificial Sequence
  Description of Artificial Sequence: Synthetic primer
  Description of Combined DNA/RNA Molecule: Synthetic primer
tgccgtcatgggaaactaccgcccagtgaaaccaggcttggttc

SEQ ID NO: 5324 - DNA, 37 bp, Artificial Sequence
  Description of Artificial Sequence: Synthetic primer
  Description of Combined DNA/RNA Molecule: Synthetic primer
acgacgacgacgaaggccacagcagcagcacagtgga

SEQ ID NO: 5325 - DNA, 39 bp, Artificial Sequence
  Description of Artificial Sequence: Synthetic primer
  Description of Combined DNA/RNA Molecule: Synthetic primer
acgacgacgacgaagcagcagcacagtgggttcautagt

SEQ ID NO: 5326 - DNA, 52 bp, Artificial Sequence
  Description of Artificial Sequence: Synthetic primer
  Description of Combined DNA/RNA Molecule: Synthetic primer
acgacgacgacttgacgaacataatggtgtggacttccctgtgctgaugtag

SEQ ID NO: 5327 - DNA, 42 bp, Artificial Sequence
  Description of Artificial Sequence: Synthetic oligonucleotide
  Description of Combined DNA/RNA Molecule: Synthetic oligonucleotide
tgcttacccacgatgcaccgcaggcacaccaggctcacacga

SEQ ID NO: 5328 - DNA, 47 bp, Artificial Sequence
  Description of Artificial Sequence: Synthetic oligonucleotide
cacagcactgtctgcagccacatcaccggtcgtatgacttgctcgca

SEQ ID NO: 5329 - DNA, 26 bp, Artificial Sequence
  Description of Artificial Sequence: Synthetic probe
ttaggctcacacagcactgtctgcag

SEQ ID NO: 5330 - DNA, 19 bp, Artificial Sequence
  Description of Artificial Sequence: Synthetic primer
tgcttacccacgatgcacc

SEQ ID NO: 5331 - DNA, 20 bp, Artificial Sequence
  Description of Artificial Sequence: Synthetic primer
tgcgagcaagtcatacgacc

SEQ ID NO: 5332 - DNA, 56 bp, Artificial Sequence
  Description of Artificial Sequence: Synthetic primer
  Description of Combined DNA/RNA Molecule: Synthetic primer
tgcgagcaagtcatacgaccgctgatgtaatgatgatggatgtggtgatatggata

SEQ ID NO: 5333 - DNA, 37 bp, Artificial Sequence
  Description of Artificial Sequence: Synthetic primer
  Description of Combined DNA/RNA Molecule: Synthetic primer
acgacgacgacgaaggcactcactgccctgcaccttg

SEQ ID NO: 5334 - DNA, 41 bp, Artificial Sequence
  Description of Artificial Sequence: Synthetic primer
  Description of Combined DNA/RNA Molecule: Synthetic primer
acgacgacgacgaagcactcactgccctgcaccttaattta

SEQ ID NO: 5335 - DNA, 50 bp, Artificial Sequence
  Description of Artificial Sequence: Synthetic primer
  Description of Combined DNA/RNA Molecule: Synthetic primer
acgacgacgacttgacgaacataatcctgcccctggtggtggaatcaggg

SEQ ID NO: 5336 - DNA, 44 bp, Artificial Sequence
  Description of Artificial Sequence: Synthetic oligonucleotide
  Description of Combined DNA/RNA Molecule: Synthetic oligonucleotide
ttacaggccgcatagcaactgctggcagcagcaatctcagagat

SEQ ID NO: 5337 - DNA, 42 bp, Artificial Sequence
  Description of Artificial Sequence: Synthetic oligonucleotide
gaggcccacagccagtcagcaccgttgagacatgggctcgca

SEQ ID NO: 5338 - DNA, 27 bp, Artificial Sequence
  Description of Artificial Sequence: Synthetic probe
ttaatctcagaggcccacagccagtca

SEQ ID NO: 5339 - DNA, 19 bp, Artificial Sequence
  Description of Artificial Sequence: Synthetic primer
ttacaggccgcatagcaac

SEQ ID NO: 5340 - DNA, 19 bp, Artificial Sequence
  Description of Artificial Sequence: Synthetic primer
tgcgagcccatgtctcaac

SEQ ID NO: 5341 - DNA, 51 bp, Artificial Sequence
  Description of Artificial Sequence: Synthetic primer
  Description of Combined DNA/RNA Molecule: Synthetic primer
tgcgagcccatgtctcaacaatcaggaagtggtgatgtgagatgatgctgg

SEQ ID NO: 5342 - DNA, 44 bp, Artificial Sequence
  Description of Artificial Sequence: Synthetic primer
  Description of Combined DNA/RNA Molecule: Synthetic primer
acgacgacgacgaagatctccagaggtggtgcagaaacaaccct

SEQ ID NO: 5343 - DNA, 49 bp, Artificial Sequence
  Description of Artificial Sequence: Synthetic primer
  Description of Combined DNA/RNA Molecule: Synthetic primer
acgacgacgacgaatacacacatgttctcatcaacagatctccagaggc

SEQ ID NO: 5344 - DNA, 48 bp, Artificial Sequence
  Description of Artificial Sequence: Synthetic primer
  Description of Combined DNA/RNA Molecule: Synthetic primer
acgacgacgacttgacgaacataatgggtgaggatggtgaggactggg

SEQ ID NO: 5345 - DNA, 44 bp, Artificial Sequence
  Description of Artificial Sequence: Synthetic oligonucleotide
  Description of Combined DNA/RNA Molecule: Synthetic oligonucleotide
ttcgcctaccgcagtgaaccaccagcaccccatcctacagccga

SEQ ID NO: 5346 - DNA, 41 bp, Artificial Sequence
  Description of Artificial Sequence: Synthetic oligonucleotide
gccagtgcctccacaccccagcgttgagacatgggctcgca

SEQ ID NO: 5347 - DNA, 25 bp, Artificial Sequence
  Description of Artificial Sequence: Synthetic probe
tttcctacagccagtgcctccacac

SEQ ID NO: 5348 - DNA, 19 bp, Artificial Sequence
  Description of Artificial Sequence: Synthetic primer
ttcgcctaccgcagtgaac

SEQ ID NO: 5349 - DNA, 19 bp, Artificial Sequence
  Description of Artificial Sequence: Synthetic primer
tgcgagcccatgtctcaac

SEQ ID NO: 5350 - DNA, 44 bp, Artificial Sequence
  Description of Artificial Sequence: Synthetic primer
  Description of Combined DNA/RNA Molecule: Synthetic primer
tgcgagcccatgtctcaacggatggtgaggactggagttgggac

SEQ ID NO: 5351 - DNA, 45 bp, Artificial Sequence
  Description of Artificial Sequence: Synthetic primer
  Description of Combined DNA/RNA Molecule: Synthetic primer
acgacgacgacgaacacataagagttggaggtgacctccaggagt

SEQ ID NO: 5352 - DNA, 46 bp, Artificial Sequence
  Description of Artificial Sequence: Synthetic primer
  Description of Combined DNA/RNA Molecule: Synthetic primer
acgacgacgacgaatcagaacatcctcaagggcacataagagttga

SEQ ID NO: 5353 - DNA, 53 bp, Artificial Sequence
  Description of Artificial Sequence: Synthetic primer
  Description of Combined DNA/RNA Molecule: Synthetic primer
acgacgacgacttgacgaacataattgctcagagcctgcacatgtgtautggc

SEQ ID NO: 5354 - DNA, 56 bp, Artificial Sequence
  Description of Artificial Sequence: Synthetic oligonucleotide
  Description of Combined DNA/RNA Molecule: Synthetic oligonucleotide
ttgcatttcgttagcgacacagagcacctaattttgagccacagaactccagcctg

SEQ ID NO: 5355 - DNA, 44 bp, Artificial Sequence
  Description of Artificial Sequence: Synthetic oligonucleotide
gcccacttctccaagggaaccaggtgtgagtcgatctacccgca

SEQ ID NO: 5356 - DNA, 26 bp, Artificial Sequence
  Description of Artificial Sequence: Synthetic probe
ttaactccagcccacttctccaaggg

SEQ ID NO: 5357 - DNA, 21 bp, Artificial Sequence
  Description of Artificial Sequence: Synthetic primer
ttgcatttcgttagcgacaca

SEQ ID NO: 5358 - DNA, 20 bp, Artificial Sequence
  Description of Artificial Sequence: Synthetic primer
tgcgggtagatcgactcaca

SEQ ID NO: 5359 - DNA, 51 bp, Artificial Sequence
  Description of Artificial Sequence: Synthetic primer
  Description of Combined DNA/RNA Molecule: Synthetic primer
tgcgggtagatcgactcacagagcctgcacatgtgtattggtgtatgccta

SEQ ID NO: 5360 - DNA, 38 bp, Artificial Sequence
  Description of Artificial Sequence: Synthetic primer
  Description of Combined DNA/RNA Molecule: Synthetic primer
acgacgacgacgaagtgagccaccaccaccccaccata

SEQ ID NO: 5361 - DNA, 40 bp, Artificial Sequence
  Description of Artificial Sequence: Synthetic primer
  Description of Combined DNA/RNA Molecule: Synthetic primer
acgacgacgacgaacagaccagccacactgggtgagccat

SEQ ID NO: 5362 - DNA, 52 bp, Artificial Sequence
  Description of Artificial Sequence: Synthetic primer
  Description of Combined DNA/RNA Molecule: Synthetic primer
acgacgacgacttgacgaacataatcctctggcagtgggtactgtgcugtgc

SEQ ID NO: 5363 - DNA, 48 bp, Artificial Sequence
  Description of Artificial Sequence: Synthetic oligonucleotide
  Description of Combined DNA/RNA Molecule: Synthetic oligonucleotide
ttgcatttcgttagcgacacacatgctcaacaggcagcactcagacgt

SEQ ID NO: 5364 - DNA, 44 bp, Artificial Sequence
  Description of Artificial Sequence: Synthetic oligonucleotide
gacacacaccacccaggcctcagctgtgagtcgatctacccgca

SEQ ID NO: 5365 - DNA, 26 bp, Artificial Sequence
  Description of Artificial Sequence: Synthetic probe
ttgcactcagacacacaccacccagg

SEQ ID NO: 5366 - DNA, 21 bp, Artificial Sequence
  Description of Artificial Sequence: Synthetic primer
ttgcatttcgttagcgacaca

SEQ ID NO: 5367 - DNA, 20 bp, Artificial Sequence
  Description of Artificial Sequence: Synthetic primer
tgcgggtagatcgactcaca

SEQ ID NO: 5368 - DNA, 47 bp, Artificial Sequence
  Description of Artificial Sequence: Synthetic primer
  Description of Combined DNA/RNA Molecule: Synthetic primer
tgcgggtagatcgactcacactggcagtgggtactgtgctatgtccg

SEQ ID NO: 5369 - DNA, 39 bp, Artificial Sequence
  Description of Artificial Sequence: Synthetic primer
  Description of Combined DNA/RNA Molecule: Synthetic primer
acgacgacgacgaagccagatggtgccaatggcaggaaa

SEQ ID NO: 5370 - DNA, 41 bp, Artificial Sequence
  Description of Artificial Sequence: Synthetic primer
  Description of Combined DNA/RNA Molecule: Synthetic primer
acgacgacgacgaacagatggtgccaatggcaggaagtgaa

SEQ ID NO: 5371 - DNA, 52 bp, Artificial Sequence
  Description of Artificial Sequence: Synthetic primer
  Description of Combined DNA/RNA Molecule: Synthetic primer
acgacgacgacttgacgaacataatgtgcatgtggccaactctgtgcaccta

SEQ ID NO: 5372 - DNA, 48 bp, Artificial Sequence
  Description of Artificial Sequence: Synthetic oligonucleotide
  Description of Combined DNA/RNA Molecule: Synthetic oligonucleotide
taccactcatcttctgcgacaagcagacagcagtgacaagacautgtt

SEQ ID NO: 5373 - DNA, 50 bp, Artificial Sequence
  Description of Artificial Sequence: Synthetic oligonucleotide
ttgccagatgagagcacaccacccaagatgtgtgagtcgatctacccgca

SEQ ID NO: 5374 - DNA, 30 bp, Artificial Sequence
  Description of Artificial Sequence: Synthetic probe
ttcaagacattgccagatgagagcacacca

SEQ ID NO: 5375 - DNA, 21 bp, Artificial Sequence
  Description of Artificial Sequence: Synthetic primer
taccactcatcttctgcgaca

SEQ ID NO: 5376 - DNA, 20 bp, Artificial Sequence
  Description of Artificial Sequence: Synthetic primer
tgcgggtagatcgactcaca

SEQ ID NO: 5377 - DNA, 46 bp, Artificial Sequence
  Description of Artificial Sequence: Synthetic primer
  Description of Combined DNA/RNA Molecule: Synthetic primer
tgcgggtagatcgactcacatgtggccaactctgtgcacttggtgt

SEQ ID NO: 5378 - DNA, 41 bp, Artificial Sequence
  Description of Artificial Sequence: Synthetic primer
  Description of Combined DNA/RNA Molecule: Synthetic primer
acgacgacgacgaacatggaggcaaggccactgtcactcta

SEQ ID NO: 5379 - DNA, 41 bp, Artificial Sequence
  Description of Artificial Sequence: Synthetic primer
  Description of Combined DNA/RNA Molecule: Synthetic primer
acgacgacgacgaaggaggcaaggccactgtcactcugggt

SEQ ID NO: 5380 - DNA, 54 bp, Artificial Sequence
  Description of Artificial Sequence: Synthetic primer
  Description of Combined DNA/RNA Molecule: Synthetic primer
acgacgacgacttgacgaacataattccaatctgttctgtggagctggcagcat

SEQ ID NO: 5381 - DNA, 49 bp, Artificial Sequence
  Description of Artificial Sequence: Synthetic oligonucleotide
  Description of Combined DNA/RNA Molecule: Synthetic oligonucleotide
tctcatgggcgctagtatcaacctgtttccagccagaggacgcaagaag

SEQ ID NO: 5382 - DNA, 54 bp, Artificial Sequence
  Description of Artificial Sequence: Synthetic oligonucleotide
agagaaggcagcaccacacttacttctcccaggtttccctgattgatacccgca

SEQ ID NO: 5383 - DNA, 26 bp, Artificial Sequence
  Description of Artificial Sequence: Synthetic probe
ttggacgcaagagaaggcagcaccac

SEQ ID NO: 5384 - DNA, 22 bp, Artificial Sequence
  Description of Artificial Sequence: Synthetic primer
tctcatgggcgctagtatcaac

SEQ ID NO: 5385 - DNA, 22 bp, Artificial Sequence
  Description of Artificial Sequence: Synthetic primer
tgcgggtatcaatcagggaaac

SEQ ID NO: 5386 - DNA, 44 bp, Artificial Sequence
  Description of Artificial Sequence: Synthetic primer
  Description of Combined DNA/RNA Molecule: Synthetic primer
tgcgggtatcaatcagggaaacctggcagcaccaggcttgggaa

SEQ ID NO: 5387 - DNA, 41 bp, Artificial Sequence
  Description of Artificial Sequence: Synthetic primer
  Description of Combined DNA/RNA Molecule: Synthetic primer
acgacgacgacgaagccactgccatcagactctgcaggtaa

SEQ ID NO: 5388 - DNA, 42 bp, Artificial Sequence
  Description of Artificial Sequence: Synthetic primer
  Description of Combined DNA/RNA Molecule: Synthetic primer
acgacgacgacgaacatcctcagagtggccactgccaucagg

SEQ ID NO: 5389 - DNA, 49 bp, Artificial Sequence
  Description of Artificial Sequence: Synthetic primer
  Description of Combined DNA/RNA Molecule: Synthetic primer
acgacgacgacttgacgaacataatccctgagggacccatgtcaggccc

SEQ ID NO: 5390 - DNA, 46 bp, Artificial Sequence
  Description of Artificial Sequence: Synthetic oligonucleotide
  Description of Combined DNA/RNA Molecule: Synthetic oligonucleotide
tggatcgagacggaatgcaacgtagagctgggccaggaacaacaaa

SEQ ID NO: 5391 - DNA, 49 bp, Artificial Sequence
  Description of Artificial Sequence: Synthetic oligonucleotide
acaggcaacattggtagggacccaggggtttccctgattgatacccgca

SEQ ID NO: 5392 - DNA, 29 bp, Artificial Sequence
  Description of Artificial Sequence: Synthetic probe
ttaggaacaacaggcaacattggtaggga

SEQ ID NO: 5393 - DNA, 21 bp, Artificial Sequence
  Description of Artificial Sequence: Synthetic primer
tggatcgagacggaatgcaac

SEQ ID NO: 5394 - DNA, 22 bp, Artificial Sequence
  Description of Artificial Sequence: Synthetic primer
tgcgggtatcaatcagggaaac

SEQ ID NO: 5395 - DNA, 50 bp, Artificial Sequence
  Description of Artificial Sequence: Synthetic primer
  Description of Combined DNA/RNA Molecule: Synthetic primer
tgcgggtatcaatcagggaaacctgggatagggactgctgtccttgggtt

SEQ ID NO: 5396 - DNA, 40 bp, Artificial Sequence
  Description of Artificial Sequence: Synthetic primer
  Description of Combined DNA/RNA Molecule: Synthetic primer
acgacgacgacgaacacacagaggtgggaccagcaggtta

SEQ ID NO: 5397 - DNA, 40 bp, Artificial Sequence
  Description of Artificial Sequence: Synthetic primer
  Description of Combined DNA/RNA Molecule: Synthetic primer
acgacgacgacgaaacaagggcagctccacacagaggtga

SEQ ID NO: 5398 - DNA, 50 bp, Artificial Sequence
  Description of Artificial Sequence: Synthetic primer
  Description of Combined DNA/RNA Molecule: Synthetic primer
acgacgacgacttgacgaacataatcccatctgcctggcagtggcuggac

SEQ ID NO: 5399 - DNA, 46 bp, Artificial Sequence
  Description of Artificial Sequence: Synthetic oligonucleotide
  Description of Combined DNA/RNA Molecule: Synthetic oligonucleotide
ttgcaacaggctaccgaccggaacagagttgaggcccaccagggat

SEQ ID NO: 5400 - DNA, 43 bp, Artificial Sequence
  Description of Artificial Sequence: Synthetic oligonucleotide
ggagccagcacatggagggtggggtaggtaaggaagtcacgca

SEQ ID NO: 5401 - DNA, 20 bp, Artificial Sequence
  Description of Artificial Sequence: Synthetic probe
ttcccaccaggagccagcac

SEQ ID NO: 5402 - DNA, 19 bp, Artificial Sequence
  Description of Artificial Sequence: Synthetic primer
ttgcaacaggctaccgacc

SEQ ID NO: 5403 - DNA, 21 bp, Artificial Sequence
  Description of Artificial Sequence: Synthetic primer
tgcgtgacttccttacctacc

SEQ ID NO: 5404 - DNA, 46 bp, Artificial Sequence
  Description of Artificial Sequence: Synthetic primer
  Description of Combined DNA/RNA Molecule: Synthetic primer
tgcgtgacttccttacctaccccatctgcctggcagtggttggatt

SEQ ID NO: 5405 - DNA, 48 bp, Artificial Sequence
  Description of Artificial Sequence: Synthetic primer
  Description of Combined DNA/RNA Molecule: Synthetic primer
acgacgacgacgaaaggaattctgttaattcactcacccaccagcctt

SEQ ID NO: 5406 - DNA, 45 bp, Artificial Sequence
  Description of Artificial Sequence: Synthetic primer
  Description of Combined DNA/RNA Molecule: Synthetic primer
acgacgacgacgaagttaattcactcacccaccagcctcagggta

SEQ ID NO: 5407 - DNA, 46 bp, Artificial Sequence
  Description of Artificial Sequence: Synthetic primer
  Description of Combined DNA/RNA Molecule: Synthetic primer
acgacgacgacttgacgaacataatggctgggtgcctgggcuctga

SEQ ID NO: 5408 - DNA, 47 bp, Artificial Sequence
  Description of Artificial Sequence: Synthetic oligonucleotide
  Description of Combined DNA/RNA Molecule: Synthetic oligonucleotide
taagcctgcttttccgaaacaagcaggctccaagcactctcacactc

SEQ ID NO: 5409 - DNA, 42 bp, Artificial Sequence
  Description of Artificial Sequence: Synthetic oligonucleotide
cacctgccagccccctgcaagttgtattgcgccaggatagca

SEQ ID NO: 5410 - DNA, 23 bp, Artificial Sequence
  Description of Artificial Sequence: Synthetic probe
ttactctcacacctgccagcccc

SEQ ID NO: 5411 - DNA, 22 bp, Artificial Sequence
  Description of Artificial Sequence: Synthetic primer
taagcctgcttttccgaaacaa

SEQ ID NO: 5412 - DNA, 21 bp, Artificial Sequence
  Description of Artificial Sequence: Synthetic primer
tgctatcctggcgcaatacaa

SEQ ID NO: 5413 - DNA, 45 bp, Artificial Sequence
  Description of Artificial Sequence: Synthetic primer
  Description of Combined DNA/RNA Molecule: Synthetic primer
tgctatcctggcgcaatacaacctgggctctgaggaagatgagta

SEQ ID NO: 5414 - DNA, 38 bp, Artificial Sequence
  Description of Artificial Sequence: Synthetic primer
  Description of Combined DNA/RNA Molecule: Synthetic primer
acgacgacgacgaagctgcacaaagccagcccagggaa

SEQ ID NO: 5415 - DNA, 39 bp, Artificial Sequence
  Description of Artificial Sequence: Synthetic primer
  Description of Combined DNA/RNA Molecule: Synthetic primer
acgacgacgacgaacccagctgcacaaagccagcccaga

SEQ ID NO: 5416 - DNA, 56 bp, Artificial Sequence
  Description of Artificial Sequence: Synthetic primer
  Description of Combined DNA/RNA Molecule: Synthetic primer
acgacgacgacttgacgaacataataggttgtttgtaggccaagtgattgcaaggg

SEQ ID NO: 5417 - DNA, 48 bp, Artificial Sequence
  Description of Artificial Sequence: Synthetic oligonucleotide
  Description of Combined DNA/RNA Molecule: Synthetic oligonucleotide
ttggcaactctccacccaaggaggcaataaggagcaagccccaggttg

SEQ ID NO: 5418 - DNA, 46 bp, Artificial Sequence
  Description of Artificial Sequence: Synthetic oligonucleotide
ggtcagcccagcaccactgcttcagttgtattgcgccaggatagca

SEQ ID NO: 5419 - DNA, 20 bp, Artificial Sequence
  Description of Artificial Sequence: Synthetic probe
ttagccccaggtcagcccag

SEQ ID NO: 5420 - DNA, 19 bp, Artificial Sequence
  Description of Artificial Sequence: Synthetic primer
ttggcaactctccacccaa

SEQ ID NO: 5421 - DNA, 21 bp, Artificial Sequence
  Description of Artificial Sequence: Synthetic primer
tgctatcctggcgcaatacaa

SEQ ID NO: 5422 - DNA, 50 bp, Artificial Sequence
  Description of Artificial Sequence: Synthetic primer
  Description of Combined DNA/RNA Molecule: Synthetic primer
tgctatcctggcgcaatacaagcaaggactctgagctgaagcaatggtgt

SEQ ID NO: 5423 - DNA, 22 bp, Artificial Sequence
  Description of Artificial Sequence: Synthetic oligonucleotide
cacacaagaggctgaggctgca

SEQ ID NO: 5424 - DNA, 38 bp, Artificial Sequence
  Description of Artificial Sequence: Synthetic primer
  Description of Combined DNA/RNA Molecule: Synthetic primer
acgacgacgacgaagcctggctgcatgtgtgcaggcaa

SEQ ID NO: 5425 - DNA, 38 bp, Artificial Sequence
  Description of Artificial Sequence: Synthetic primer
  Description of Combined DNA/RNA Molecule: Synthetic primer
acgacgacgacgaaggctgcatgtgtgcaggcagaggt

SEQ ID NO: 5426 - DNA, 55 bp, Artificial Sequence
  Description of Artificial Sequence: Synthetic primer
  Description of Combined DNA/RNA Molecule: Synthetic primer
acgacgacgacttgacgaacataatgtgaacaagagctgtgtgtgcaggagagaa

SEQ ID NO: 5427 - DNA, 44 bp, Artificial Sequence
  Description of Artificial Sequence: Synthetic oligonucleotide
  Description of Combined DNA/RNA Molecule: Synthetic oligonucleotide
tttccgccgctacaaccaacacaagaggctgaggctacagtgaa

SEQ ID NO: 5428 - DNA, 44 bp, Artificial Sequence
  Description of Artificial Sequence: Synthetic oligonucleotide
gtgggcagcatgtctgtggcacaccttgaagcagcgtctgagca

SEQ ID NO: 5429 - DNA, 25 bp, Artificial Sequence
  Description of Artificial Sequence: Synthetic probe
aaggctacagtgggcagcatgtctg

SEQ ID NO: 5430 - DNA, 19 bp, Artificial Sequence
  Description of Artificial Sequence: Synthetic primer
tttccgccgctacaaccaa

SEQ ID NO: 5431 - DNA, 19 bp, Artificial Sequence
  Description of Artificial Sequence: Synthetic primer
tgctcagacgctgcttcaa

SEQ ID NO: 5432 - DNA, 45 bp, Artificial Sequence
  Description of Artificial Sequence: Synthetic primer
  Description of Combined DNA/RNA Molecule: Synthetic primer
tgctcagacgctgcttcaagtgtgcaggagagagaggtatgccat

SEQ ID NO: 5433 - DNA, 41 bp, Artificial Sequence
  Description of Artificial Sequence: Synthetic primer
  Description of Combined DNA/RNA Molecule: Synthetic primer
acgacgacgacgaaggatgcaatccagggtgaggacutgga

SEQ ID NO: 5434 - DNA, 42 bp, Artificial Sequence
  Description of Artificial Sequence: Synthetic primer
  Description of Combined DNA/RNA Molecule: Synthetic primer
acgacgacgacgaactgcaggatgcaatccagggtgaggacg

SEQ ID NO: 5435 - DNA, 49 bp, Artificial Sequence
  Description of Artificial Sequence: Synthetic primer
  Description of Combined DNA/RNA Molecule: Synthetic primer
acgacgacgacttgacgaacataatctgtggcctgttgggtgccutcta

SEQ ID NO: 5436 - DNA, 43 bp, Artificial Sequence
  Description of Artificial Sequence: Synthetic oligonucleotide
  Description of Combined DNA/RNA Molecule: Synthetic oligonucleotide
tcgtagactcgctatcgccaggcaggcacttgtggacaggctt

SEQ ID NO: 5437 - DNA, 45 bp, Artificial Sequence
  Description of Artificial Sequence: Synthetic oligonucleotide
ggcccagggcacaacacttggagaactggtgagcagggatgagca

SEQ ID NO: 5438 - DNA, 22 bp, Artificial Sequence
  Description of Artificial Sequence: Synthetic probe
aagtggacaggcccagggcaca

SEQ ID NO: 5439 - DNA, 20 bp, Artificial Sequence
  Description of Artificial Sequence: Synthetic primer
tcgtagactcgctatcgcca

SEQ ID NO: 5440 - DNA, 19 bp, Artificial Sequence
  Description of Artificial Sequence: Synthetic primer
tgctcatccctgctcacca

SEQ ID NO: 5441 - DNA, 47 bp, Artificial Sequence
  Description of Artificial Sequence: Synthetic primer
  Description of Combined DNA/RNA Molecule: Synthetic primer
tgctcatccctgctcaccagccttctggcctgttctccaaatgttgc

SEQ ID NO: 5442 - DNA, 46 bp, Artificial Sequence
  Description of Artificial Sequence: Synthetic primer
  Description of Combined DNA/RNA Molecule: Synthetic primer
acgacgacgacgaacagaaaatgctgaaaggaaaagccccaagaga

SEQ ID NO: 5443 - DNA, 44 bp, Artificial Sequence
  Description of Artificial Sequence: Synthetic primer
  Description of Combined DNA/RNA Molecule: Synthetic primer
acgacgacgacgaagctgaaaggaaaagccccaagaggacacaa

SEQ ID NO: 5444 - DNA, 50 bp, Artificial Sequence
  Description of Artificial Sequence: Synthetic primer
  Description of Combined DNA/RNA Molecule: Synthetic primer
acgacgacgacttgacgaacataatagtgaccagggcactgtggcugggc

SEQ ID NO: 5445 - DNA, 48 bp, Artificial Sequence
  Description of Artificial Sequence: Synthetic oligonucleotide
  Description of Combined DNA/RNA Molecule: Synthetic oligonucleotide
ttgcacccgcgacataaccgctctaggaactcagggcaccgcaagcgt

SEQ ID NO: 5446 - DNA, 47 bp, Artificial Sequence
  Description of Artificial Sequence: Synthetic oligonucleotide
agcacctcatcccctcccttccaccggtaattcactcgaacggagca

SEQ ID NO: 5447 - DNA, 25 bp, Artificial Sequence
  Description of Artificial Sequence: Synthetic probe
ttcaccgcaagcacctcatcccctc

SEQ ID NO: 5448 - DNA, 19 bp, Artificial Sequence
  Description of Artificial Sequence: Synthetic primer
ttgcacccgcgacataacc

SEQ ID NO: 5449 - DNA, 22 bp, Artificial Sequence
  Description of Artificial Sequence: Synthetic primer
tgctccgttcgagtgaattacc

SEQ ID NO: 5450 - DNA, 45 bp, Artificial Sequence
  Description of Artificial Sequence: Synthetic primer
  Description of Combined DNA/RNA Molecule: Synthetic primer
tgctccgttcgagtgaattaccagggcactgtggctggatggaaa

SEQ ID NO: 5451 - DNA, 42 bp, Artificial Sequence
  Description of Artificial Sequence: Synthetic primer
  Description of Combined DNA/RNA Molecule: Synthetic primer
acgacgacgacgaacactgcaggattcagcattgccaccagt

SEQ ID NO: 5452 - DNA, 41 bp, Artificial Sequence
  Description of Artificial Sequence: Synthetic primer
  Description of Combined DNA/RNA Molecule: Synthetic primer
acgacgacgacgaagcaggattcagcattgccaccagcccg

SEQ ID NO: 5453 - DNA, 52 bp, Artificial Sequence
  Description of Artificial Sequence: Synthetic primer
  Description of Combined DNA/RNA Molecule: Synthetic primer
acgacgacgacttgacgaacataatggtggaggctgaaggtctgtggggcaa

SEQ ID NO: 5454 - DNA, 50 bp, Artificial Sequence
  Description of Artificial Sequence: Synthetic oligonucleotide
  Description of Combined DNA/RNA Molecule: Synthetic oligonucleotide
tccggcctttgacgataccgaggagtgaattagcaccctcctccauccct

SEQ ID NO: 5455 - DNA, 48 bp, Artificial Sequence
  Description of Artificial Sequence: Synthetic oligonucleotide
tcctcagcccttccaacagcacaaggggtaattcactcgaacggagca

SEQ ID NO: 5456 - DNA, 27 bp, Artificial Sequence
  Description of Artificial Sequence: Synthetic probe
tttcctccatcctcagcccttccaaca

SEQ ID NO: 5457 - DNA, 19 bp, Artificial Sequence
  Description of Artificial Sequence: Synthetic primer
tccggcctttgacgatacc

SEQ ID NO: 5458 - DNA, 22 bp, Artificial Sequence
  Description of Artificial Sequence: Synthetic primer
tgctccgttcgagtgaattacc

SEQ ID NO: 5459 - DNA, 49 bp, Artificial Sequence
  Description of Artificial Sequence: Synthetic primer
  Description of Combined DNA/RNA Molecule: Synthetic primer
tgctccgttcgagtgaattacctgaggcaggacaggagttccctgtgcc

SEQ ID NO: 5460 - DNA, 40 bp, Artificial Sequence
  Description of Artificial Sequence: Synthetic primer
  Description of Combined DNA/RNA Molecule: Synthetic primer
acgacgacgacgaagcacagctgcacactcactcaugtga

SEQ ID NO: 5461 - DNA, 42 bp, Artificial Sequence
  Description of Artificial Sequence: Synthetic primer
  Description of Combined DNA/RNA Molecule: Synthetic primer
acgacgacgacgaagctgcacactcactcatgtggacuggag

SEQ ID NO: 5462 - DNA, 47 bp, Artificial Sequence
  Description of Artificial Sequence: Synthetic primer
  Description of Combined DNA/RNA Molecule: Synthetic primer
acgacgacgacttgacgaacataatcccagggctgcacagccuactc

SEQ ID NO: 5463 - DNA, 58 bp, Artificial Sequence
  Description of Artificial Sequence: Synthetic oligonucleotide
  Description of Combined DNA/RNA Molecule: Synthetic oligonucleotide
tcgcggaaagtcccagtaacggaaacactccaagccagttattttaaaaatcaggagg

SEQ ID NO: 5464 - DNA, 51 bp, Artificial Sequence
  Description of Artificial Sequence: Synthetic oligonucleotide
ggaaataaggcaggttccctcttcacccaccgttggcctgtaagcgttcca

SEQ ID NO: 5465 - DNA, 33 bp, Artificial Sequence
  Description of Artificial Sequence: Synthetic probe
ccaaaatcaggaaataaggcaggttccctcttc

SEQ ID NO: 5466 - DNA, 20 bp, Artificial Sequence
  Description of Artificial Sequence: Synthetic primer
tcgcggaaagtcccagtaac

SEQ ID NO: 5467 - DNA, 20 bp, Artificial Sequence
  Description of Artificial Sequence: Synthetic primer
tggaacgcttacaggccaac

SEQ ID NO: 5468 - DNA, 48 bp, Artificial Sequence
  Description of Artificial Sequence: Synthetic primer
  Description of Combined DNA/RNA Molecule: Synthetic primer
tggaacgcttacaggccaaccagcctacttggtgggaagtgatgggta

SEQ ID NO: 5469 - DNA, 41 bp, Artificial Sequence
  Description of Artificial Sequence: Synthetic primer
  Description of Combined DNA/RNA Molecule: Synthetic primer
acgacgacgacgaacaagaatggtggtgaggaagcagggtg

SEQ ID NO: 5470 - DNA, 39 bp, Artificial Sequence
  Description of Artificial Sequence: Synthetic primer
  Description of Combined DNA/RNA Molecule: Synthetic primer
acgacgacgacgaaggtggtgaggaagcagggtaggcaa

SEQ ID NO: 5471 - DNA, 55 bp, Artificial Sequence
  Description of Artificial Sequence: Synthetic primer
  Description of Combined DNA/RNA Molecule: Synthetic primer
acgacgacgacttgacgaacataatggctgaggagggaggtggatagaaagggag

SEQ ID NO: 5472 - DNA, 45 bp, Artificial Sequence
  Description of Artificial Sequence: Synthetic oligonucleotide
  Description of Combined DNA/RNA Molecule: Synthetic oligonucleotide
tgaacgctcaaacacgtgaacctcagcagaggctgccccagcatc

SEQ ID NO: 5473 - DNA, 45 bp, Artificial Sequence
  Description of Artificial Sequence: Synthetic oligonucleotide
gcactctgctcctacccaagaggccgttggcctgtaagcgttcca

SEQ ID NO: 5474 - DNA, 24 bp, Artificial Sequence
  Description of Artificial Sequence: Synthetic probe
tttgccccagcactctgctcctac

SEQ ID NO: 5475 - DNA, 21 bp, Artificial Sequence
  Description of Artificial Sequence: Synthetic primer
tgaacgctcaaacacgtgaac

SEQ ID NO: 5476 - DNA, 20 bp, Artificial Sequence
  Description of Artificial Sequence: Synthetic primer
tggaacgcttacaggccaac

SEQ ID NO: 5477 - DNA, 50 bp, Artificial Sequence
  Description of Artificial Sequence: Synthetic primer
  Description of Combined DNA/RNA Molecule: Synthetic primer
tggaacgcttacaggccaacgggaactgtgggtagaaagggaattgggct

SEQ ID NO: 5478 - DNA, 40 bp, Artificial Sequence
  Description of Artificial Sequence: Synthetic primer
  Description of Combined DNA/RNA Molecule: Synthetic primer
acgacgacgacgaagctctgccctgacagcatgcacccct

SEQ ID NO: 5479 - DNA, 40 bp, Artificial Sequence
  Description of Artificial Sequence: Synthetic primer
  Description of Combined DNA/RNA Molecule: Synthetic primer
acgacgacgacgaactgagctctgccctgacagcaugcat

SEQ ID NO: 5480 - DNA, 58 bp, Artificial Sequence
  Description of Artificial Sequence: Synthetic primer
  Description of Combined DNA/RNA Molecule: Synthetic primer
acgacgacgacttgacgaacataattatgtggggtacttcatgaaactgagcccattc

SEQ ID NO: 5481 - DNA, 48 bp, Artificial Sequence
  Description of Artificial Sequence: Synthetic oligonucleotide
  Description of Combined DNA/RNA Molecule: Synthetic oligonucleotide
tacacgtggatatctccgacccccccacttctgtgagagcgcactttt

SEQ ID NO: 5482 - DNA, 53 bp, Artificial Sequence
  Description of Artificial Sequence: Synthetic oligonucleotide
cttcctggcatgggagtcaaatcatgtcaataggtgctagtcacacagttcca

SEQ ID NO: 5483 - DNA, 23 bp, Artificial Sequence
  Description of Artificial Sequence: Synthetic probe
ttgagcgcacttcctggcatggg

SEQ ID NO: 5484 - DNA, 21 bp, Artificial Sequence
  Description of Artificial Sequence: Synthetic primer
tacacgtggatatctccgacc

SEQ ID NO: 5485 - DNA, 21 bp, Artificial Sequence
  Description of Artificial Sequence: Synthetic primer
tggaactgtgtgactagcacc

SEQ ID NO: 5486 - DNA, 59 bp, Artificial Sequence
  Description of Artificial Sequence: Synthetic primer
  Description of Combined DNA/RNA Molecule: Synthetic primer
tggaactgtgtgactagcacccatgaaactgagcccattttattgacatgatctgacct

SEQ ID NO: 5487 - DNA, 42 bp, Artificial Sequence
  Description of Artificial Sequence: Synthetic primer
  Description of Combined DNA/RNA Molecule: Synthetic primer
acgacgacgacgaaggtgagggtgatgcacaatcccaaggaa

SEQ ID NO: 5488 - DNA, 43 bp, Artificial Sequence
  Description of Artificial Sequence: Synthetic primer
  Description of Combined DNA/RNA Molecule: Synthetic primer
acgacgacgacgaaggtgatgcacaatcccaaggaggactgag

SEQ ID NO: 5489 - DNA, 52 bp, Artificial Sequence
  Description of Artificial Sequence: Synthetic primer
  Description of Combined DNA/RNA Molecule: Synthetic primer
acgacgacgacttgacgaacataattgatgtggttgtggtgaggctcaggta

SEQ ID NO: 5490 - DNA, 46 bp, Artificial Sequence
  Description of Artificial Sequence: Synthetic oligonucleotide
  Description of Combined DNA/RNA Molecule: Synthetic oligonucleotide
tcgatggtcaatgagcttcacagtggcagcaaccagcaacauccga

SEQ ID NO: 5491 - DNA, 49 bp, Artificial Sequence
  Description of Artificial Sequence: Synthetic oligonucleotide
tccagctcccacacctcactgcacatctgttacgtgatctccctctcca

SEQ ID NO: 5492 - DNA, 26 bp, Artificial Sequence
  Description of Artificial Sequence: Synthetic probe
ttagcaacatccagctcccacacctc

SEQ ID NO: 5493 - DNA, 22 bp, Artificial Sequence
  Description of Artificial Sequence: Synthetic primer
tcgatggtcaatgagcttcaca

SEQ ID NO: 5494 - DNA, 22 bp, Artificial Sequence
  Description of Artificial Sequence: Synthetic primer
tggagagggagatcacgtaaca

SEQ ID NO: 5495 - DNA, 48 bp, Artificial Sequence
  Description of Artificial Sequence: Synthetic primer
  Description of Combined DNA/RNA Molecule: Synthetic primer
tggagagggagatcacgtaacagttgtggtgaggctcaggtatgatgc

SEQ ID NO: 5496 - DNA, 45 bp, Artificial Sequence
  Description of Artificial Sequence: Synthetic primer
  Description of Combined DNA/RNA Molecule: Synthetic primer
acgacgacgacgaacccacaagtcaagattcacaggtgcacacat

SEQ ID NO: 5497 - DNA, 46 bp, Artificial Sequence
  Description of Artificial Sequence: Synthetic primer
  Description of Combined DNA/RNA Molecule: Synthetic primer
acgacgacgacgaaccacaaacccacaagtcaagattcacaggtgt

SEQ ID NO: 5498 - DNA, 55 bp, Artificial Sequence
  Description of Artificial Sequence: Synthetic primer
  Description of Combined DNA/RNA Molecule: Synthetic primer
acgacgacgacttgacgaacataatcctttttctggtgagggacatgtccutcta

SEQ ID NO: 5499 - DNA, 54 bp, Artificial Sequence
  Description of Artificial Sequence: Synthetic oligonucleotide
  Description of Combined DNA/RNA Molecule: Synthetic oligonucleotide
tcgatggtcaatgagcttcacacacactaaggactgagctattgggacaatgag

SEQ ID NO: 5500 - DNA, 53 bp, Artificial Sequence
  Description of Artificial Sequence: Synthetic oligonucleotide
atggagagagtctcactctgcatcagggacatgttacgtgatctccctctcca

SEQ ID NO: 5501 - DNA, 29 bp, Artificial Sequence
  Description of Artificial Sequence: Synthetic probe
cctgggacaatggagagagtctcactctg

SEQ ID NO: 5502 - DNA, 22 bp, Artificial Sequence
  Description of Artificial Sequence: Synthetic primer
tcgatggtcaatgagcttcaca

SEQ ID NO: 5503 - DNA, 22 bp, Artificial Sequence
  Description of Artificial Sequence: Synthetic primer
tggagagggagatcacgtaaca

SEQ ID NO: 5504 - DNA, 51 bp, Artificial Sequence
  Description of Artificial Sequence: Synthetic primer
  Description of Combined DNA/RNA Molecule: Synthetic primer
tggagagggagatcacgtaacagggacatgtccttctgtccctggtgcagg

SEQ ID NO: 5505 - DNA, 42 bp, Artificial Sequence
  Description of Artificial Sequence: Synthetic primer
  Description of Combined DNA/RNA Molecule: Synthetic primer
acgacgacgacgaactattttggaggagagggcagcautaga

SEQ ID NO: 5506 - DNA, 41 bp, Artificial Sequence
  Description of Artificial Sequence: Synthetic primer
  Description of Combined DNA/RNA Molecule: Synthetic primer
acgacgacgacgaatttggaggagagggcagcattaggaag

SEQ ID NO: 5507 - DNA, 50 bp, Artificial Sequence
  Description of Artificial Sequence: Synthetic primer
  Description of Combined DNA/RNA Molecule: Synthetic primer
acgacgacgacttgacgaacataatgggacagggtcctggtgctcutgga

SEQ ID NO: 5508 - DNA, 53 bp, Artificial Sequence
  Description of Artificial Sequence: Synthetic oligonucleotide
  Description of Combined DNA/RNA Molecule: Synthetic oligonucleotide
tctcgggaccacaatacgaacggaaaactattccaaagcctggccgcaucctg

SEQ ID NO: 5509 - DNA, 51 bp, Artificial Sequence
  Description of Artificial Sequence: Synthetic oligonucleotide
tcccaaccagtttcaacttcctgcagctcaggttacgctaagctggtgcca

SEQ ID NO: 5510 - DNA, 26 bp, Artificial Sequence
  Description of Artificial Sequence: Synthetic probe
aaggccgcatcccaaccagtttcaac

SEQ ID NO: 5511 - DNA, 21 bp, Artificial Sequence
  Description of Artificial Sequence: Synthetic primer
tctcgggaccacaatacgaac

SEQ ID NO: 5512 - DNA, 20 bp, Artificial Sequence
  Description of Artificial Sequence: Synthetic primer
tggcaccagcttagcgtaac

SEQ ID NO: 5513 - DNA, 46 bp, Artificial Sequence
  Description of Artificial Sequence: Synthetic primer
  Description of Combined DNA/RNA Molecule: Synthetic primer
tggcaccagcttagcgtaacggacagggtcctggtgctcctgggta

SEQ ID NO: 5514 - DNA, 47 bp, Artificial Sequence
  Description of Artificial Sequence: Synthetic primer
  Description of Combined DNA/RNA Molecule: Synthetic primer
acgacgacgacgaagaatctagtcttcctctccccttcctcactcct

SEQ ID NO: 5515 - DNA, 44 bp, Artificial Sequence
  Description of Artificial Sequence: Synthetic primer
  Description of Combined DNA/RNA Molecule: Synthetic primer
acgacgacgacgaagtcttcctctccccttcctcactccctccc

SEQ ID NO: 5516 - DNA, 53 bp, Artificial Sequence
  Description of Artificial Sequence: Synthetic primer
  Description of Combined DNA/RNA Molecule: Synthetic primer
acgacgacgacttgacgaacataatgcaaaccctgagggaatgtgaacaactg

SEQ ID NO: 5517 - DNA, 48 bp, Artificial Sequence
  Description of Artificial Sequence: Synthetic oligonucleotide
  Description of Combined DNA/RNA Molecule: Synthetic oligonucleotide
tcacagagacttgccgatcacccaccaccacagtcattcctcacagga

SEQ ID NO: 5518 - DNA, 59 bp, Artificial Sequence
  Description of Artificial Sequence: Synthetic oligonucleotide
cagagtttcattgtgttgttacacaagccagcttttggtgtgtagcttagacatggcca

SEQ ID NO: 5519 - DNA, 36 bp, Artificial Sequence
  Description of Artificial Sequence: Synthetic probe
ttttcctcacagagtttcattgtgttgttacacaag

SEQ ID NO: 5520 - DNA, 21 bp, Artificial Sequence
  Description of Artificial Sequence: Synthetic primer
tcacagagacttgccgatcac

SEQ ID NO: 5521 - DNA, 22 bp, Artificial Sequence
  Description of Artificial Sequence: Synthetic primer
tggccatgtctaagctacacac

SEQ ID NO: 5522 - DNA, 39 bp, Artificial Sequence
  Description of Artificial Sequence: Synthetic primer
  Description of Combined DNA/RNA Molecule: Synthetic primer
acgacgacgacgaacaacaccccacagaggcccacctgg

SEQ ID NO: 5523 - DNA, 39 bp, Artificial Sequence
  Description of Artificial Sequence: Synthetic primer
  Description of Combined DNA/RNA Molecule: Synthetic primer
acgacgacgacgaacccacagaggcccacctgaagccaa

SEQ ID NO: 5524 - DNA, 52 bp, Artificial Sequence
  Description of Artificial Sequence: Synthetic primer
  Description of Combined DNA/RNA Molecule: Synthetic primer
acgacgacgacttgacgaacataatgtgacagcatgtgagcttgagggtgga

SEQ ID NO: 5525 - DNA, 46 bp, Artificial Sequence
  Description of Artificial Sequence: Synthetic oligonucleotide
  Description of Combined DNA/RNA Molecule: Synthetic oligonucleotide
ttcgtccctgcacgctaacccagcaccctagcagatgcgcaugttc

SEQ ID NO: 5526 - DNA, 49 bp, Artificial Sequence
  Description of Artificial Sequence: Synthetic oligonucleotide
tgtctgtcaaatcactgcctccaagcccagttccatcaccgttaggcca

SEQ ID NO: 5527 - DNA, 29 bp, Artificial Sequence
  Description of Artificial Sequence: Synthetic probe
ttatgcgcatgtctgtcaaatcactgcct

SEQ ID NO: 5528 - DNA, 19 bp, Artificial Sequence
  Description of Artificial Sequence: Synthetic primer
ttcgtccctgcacgctaac

SEQ ID NO: 5529 - DNA, 20 bp, Artificial Sequence
  Description of Artificial Sequence: Synthetic primer
tggcctaacggtgatggaac

SEQ ID NO: 5530 - DNA, 44 bp, Artificial Sequence
  Description of Artificial Sequence: Synthetic primer
  Description of Combined DNA/RNA Molecule: Synthetic primer
tggcctaacggtgatggaactgagcttgagggtgggcctggaga

SEQ ID NO: 5531 - DNA, 36 bp, Artificial Sequence
  Description of Artificial Sequence: Synthetic primer
  Description of Combined DNA/RNA Molecule: Synthetic primer
acgacgacgacgaacagccagaggcaaggcactcac

SEQ ID NO: 5532 - DNA, 38 bp, Artificial Sequence
  Description of Artificial Sequence: Synthetic primer
  Description of Combined DNA/RNA Molecule: Synthetic primer
acgacgacgacgaagccagaggcaaggcactcautggt

SEQ ID NO: 5533 - DNA, 54 bp, Artificial Sequence
  Description of Artificial Sequence: Synthetic primer
  Description of Combined DNA/RNA Molecule: Synthetic primer
acgacgacgacttgacgaacataatagtccagtggtcctgtgggtagtaagatc

SEQ ID NO: 5534 - DNA, 50 bp, Artificial Sequence
  Description of Artificial Sequence: Synthetic oligonucleotide
  Description of Combined DNA/RNA Molecule: Synthetic oligonucleotide
tgatgctggcaaaccctagaacctgagtgacacaagtcagcctcaagctg

SEQ ID NO: 5535 - DNA, 42 bp, Artificial Sequence
  Description of Artificial Sequence: Synthetic oligonucleotide
agccaccctccacacacccagggttccatcaccgttaggcca

SEQ ID NO: 5536 - DNA, 24 bp, Artificial Sequence
  Description of Artificial Sequence: Synthetic probe
aaagcctcaagccaccctccacac

SEQ ID NO: 5537 - DNA, 22 bp, Artificial Sequence
  Description of Artificial Sequence: Synthetic primer
tgatgctggcaaaccctagaac

SEQ ID NO: 5538 - DNA, 20 bp, Artificial Sequence
  Description of Artificial Sequence: Synthetic primer
tggcctaacggtgatggaac

SEQ ID NO: 5539 - DNA, 52 bp, Artificial Sequence
  Description of Artificial Sequence: Synthetic primer
  Description of Combined DNA/RNA Molecule: Synthetic primer
tggcctaacggtgatggaacgtcctgtgggtagtaagattcagagtcggagt

SEQ ID NO: 5540 - DNA, 39 bp, Artificial Sequence
  Description of Artificial Sequence: Synthetic primer
  Description of Combined DNA/RNA Molecule: Synthetic primer
acgacgacgacgaagcaccagcaggacagagccaaccag

SEQ ID NO: 5541 - DNA, 40 bp, Artificial Sequence
  Description of Artificial Sequence: Synthetic primer
  Description of Combined DNA/RNA Molecule: Synthetic primer
acgacgacgacgaacaatgcagcaccagcaggacagagct

SEQ ID NO: 5542 - DNA, 51 bp, Artificial Sequence
  Description of Artificial Sequence: Synthetic primer
  Description of Combined DNA/RNA Molecule: Synthetic primer
acgacgacgacttgacgaacataatggaaaggtccagggtctggccuccag

SEQ ID NO: 5543 - DNA, 49 bp, Artificial Sequence
  Description of Artificial Sequence: Synthetic oligonucleotide
  Description of Combined DNA/RNA Molecule: Synthetic oligonucleotide
tgatgctggcaaaccctagaacccaatcaggcagctcagcaacagggtg

SEQ ID NO: 5544 - DNA, 41 bp, Artificial Sequence
  Description of Artificial Sequence: Synthetic oligonucleotide
gggcagaggtcagggagcagggttccatcaccgttaggcca

SEQ ID NO: 5545 - DNA, 23 bp, Artificial Sequence
  Description of Artificial Sequence: Synthetic probe
aaagcaacagggcagaggtcagg

SEQ ID NO: 5546 - DNA, 22 bp, Artificial Sequence
  Description of Artificial Sequence: Synthetic primer
tgatgctggcaaaccctagaac

SEQ ID NO: 5547 - DNA, 20 bp, Artificial Sequence
  Description of Artificial Sequence: Synthetic primer
tggcctaacggtgatggaac

SEQ ID NO: 5548 - DNA, 46 bp, Artificial Sequence
  Description of Artificial Sequence: Synthetic primer
  Description of Combined DNA/RNA Molecule: Synthetic primer
tggcctaacggtgatggaactcattggcttccccttggcttgccct

SEQ ID NO: 5549 - DNA, 35 bp, Artificial Sequence
  Description of Artificial Sequence: Synthetic primer
  Description of Combined DNA/RNA Molecule: Synthetic primer
acgacgacgacgaatgaggtgagggcagcauttga

SEQ ID NO: 5550 - DNA, 38 bp, Artificial Sequence
  Description of Artificial Sequence: Synthetic primer
  Description of Combined DNA/RNA Molecule: Synthetic primer
acgacgacgacgaagaggtgagggcagcatttggggat

SEQ ID NO: 5551 - DNA, 58 bp, Artificial Sequence
  Description of Artificial Sequence: Synthetic primer
  Description of Combined DNA/RNA Molecule: Synthetic primer
acgacgacgacttgacgaacataatattgttcctgctggtgagtctgtactgagaagt

SEQ ID NO: 5552 - DNA, 48 bp, Artificial Sequence
  Description of Artificial Sequence: Synthetic oligonucleotide
  Description of Combined DNA/RNA Molecule: Synthetic oligonucleotide
ttttcggcatccgcttccagggcaacaagttttgtgcaccgcactgag

SEQ ID NO: 5553 - DNA, 53 bp, Artificial Sequence
  Description of Artificial Sequence: Synthetic oligonucleotide
ctggagtaccctgcacataaggtccactcatgtggttaacagaggacaggcca

SEQ ID NO: 5554 - DNA, 29 bp, Artificial Sequence
  Description of Artificial Sequence: Synthetic probe
aacaccgcactggagtaccctgcacataa

SEQ ID NO: 5555 - DNA, 19 bp, Artificial Sequence
  Description of Artificial Sequence: Synthetic primer
ttttcggcatccgcttcca

SEQ ID NO: 5556 - DNA, 21 bp, Artificial Sequence
  Description of Artificial Sequence: Synthetic primer
tggcctgtcctctgttaacca

SEQ ID NO: 5557 - DNA, 53 bp, Artificial Sequence
  Description of Artificial Sequence: Synthetic primer
  Description of Combined DNA/RNA Molecule: Synthetic primer
tggcctgtcctctgttaaccatgagtctgtactgagaagcccatgaatggact

SEQ ID NO: 5558 - DNA, 39 bp, Artificial Sequence
  Description of Artificial Sequence: Synthetic primer
  Description of Combined DNA/RNA Molecule: Synthetic primer
acgacgacgacgaaagcaggtgagcacagagccagaggt

SEQ ID NO: 5559 - DNA, 39 bp, Artificial Sequence
  Description of Artificial Sequence: Synthetic primer
  Description of Combined DNA/RNA Molecule: Synthetic primer
acgacgacgacgaaaggcagcaggtgagcacagagaggt

SEQ ID NO: 5560 - DNA, 50 bp, Artificial Sequence
  Description of Artificial Sequence: Synthetic primer
  Description of Combined DNA/RNA Molecule: Synthetic primer
acgacgacgacttgacgaacataatggtggtgacagctgtgaggagggaa

SEQ ID NO: 5561 - DNA, 46 bp, Artificial Sequence
  Description of Artificial Sequence: Synthetic oligonucleotide
  Description of Combined DNA/RNA Molecule: Synthetic oligonucleotide
tccgggtatacactgtcccaggcagagcagagctgagcgcagagtt

SEQ ID NO: 5562 - DNA, 48 bp, Artificial Sequence
  Description of Artificial Sequence: Synthetic oligonucleotide
gagccaagccaagctgcctctctcctctggttaacagaggacaggcca

SEQ ID NO: 5563 - DNA, 23 bp, Artificial Sequence
  Description of Artificial Sequence: Synthetic probe
aagagcgcagagccaagccaagc

SEQ ID NO: 5564 - DNA, 20 bp, Artificial Sequence
  Description of Artificial Sequence: Synthetic primer
tccgggtatacactgtccca

SEQ ID NO: 5565 - DNA, 21 bp, Artificial Sequence
  Description of Artificial Sequence: Synthetic primer
tggcctgtcctctgttaacca

SEQ ID NO: 5566 - DNA, 44 bp, Artificial Sequence
  Description of Artificial Sequence: Synthetic primer
  Description of Combined DNA/RNA Molecule: Synthetic primer
tggcctgtcctctgttaaccacagctgtgaggagggagtgggaa

SEQ ID NO: 5567 - DNA, 35 bp, Artificial Sequence
  Description of Artificial Sequence: Synthetic primer
  Description of Combined DNA/RNA Molecule: Synthetic primer
acgacgacgacgaaaggtggccctgggccaugact

SEQ ID NO: 5568 - DNA, 59 bp, Artificial Sequence
  Description of Artificial Sequence: Synthetic primer
  Description of Combined DNA/RNA Molecule: Synthetic primer
acgacgacgacttgacgaacataatgggtctttgaactttggagaccttggttagtgtt

SEQ ID NO: 5569 - DNA, 54 bp, Artificial Sequence
  Description of Artificial Sequence: Synthetic oligonucleotide
  Description of Combined DNA/RNA Molecule: Synthetic oligonucleotide
tgcgactctattcacgtccaatgaccctacttctgtcagcatctgtccaggcgt

SEQ ID NO: 5570 - DNA, 47 bp, Artificial Sequence
  Description of Artificial Sequence: Synthetic oligonucleotide
ggcacccacagaagccagactcttggttgctatttggtgtaccgcca

SEQ ID NO: 5571 - DNA, 25 bp, Artificial Sequence
  Description of Artificial Sequence: Synthetic probe
ccctgtccaggcacccacagaagcc

SEQ ID NO: 5572 - DNA, 21 bp, Artificial Sequence
  Description of Artificial Sequence: Synthetic primer
tgcgactctattcacgtccaa

SEQ ID NO: 5573 - DNA, 21 bp, Artificial Sequence
  Description of Artificial Sequence: Synthetic primer
tggcggtacaccaaatagcaa

SEQ ID NO: 5574 - DNA, 56 bp, Artificial Sequence
  Description of Artificial Sequence: Synthetic primer
  Description of Combined DNA/RNA Molecule: Synthetic primer
tggcggtacaccaaatagcaaggtctttgaactttggagaccttggttaatgtctc

SEQ ID NO: 5575 - DNA, 40 bp, Artificial Sequence
  Description of Artificial Sequence: Synthetic primer
  Description of Combined DNA/RNA Molecule: Synthetic primer
acgacgacgacgaagggaccagcaggttgggaacagagtc

SEQ ID NO: 5576 - DNA, 40 bp, Artificial Sequence
  Description of Artificial Sequence: Synthetic primer
  Description of Combined DNA/RNA Molecule: Synthetic primer
acgacgacgacgaagtgggaccagcaggttgggaacagaa

SEQ ID NO: 5577 - DNA, 50 bp, Artificial Sequence
  Description of Artificial Sequence: Synthetic primer
  Description of Combined DNA/RNA Molecule: Synthetic primer
acgacgacgacttgacgaacataatgcagctcccatctgcctggcagtga

SEQ ID NO: 5578 - DNA, 43 bp, Artificial Sequence
  Description of Artificial Sequence: Synthetic oligonucleotide
  Description of Combined DNA/RNA Molecule: Synthetic oligonucleotide
ttgtgcagagcgaacaacaagcccatcagaggccaacacataa

SEQ ID NO: 5579 - DNA, 47 bp, Artificial Sequence
  Description of Artificial Sequence: Synthetic oligonucleotide
catggagggtgggaggatccagccacttgctatttggtgtaccgcca

SEQ ID NO: 5580 - DNA, 25 bp, Artificial Sequence
  Description of Artificial Sequence: Synthetic probe
ttgccaacacatggagggtgggagg

SEQ ID NO: 5581 - DNA, 20 bp, Artificial Sequence
  Description of Artificial Sequence: Synthetic primer
ttgtgcagagcgaacaacaa

SEQ ID NO: 5582 - DNA, 21 bp, Artificial Sequence
  Description of Artificial Sequence: Synthetic primer
tggcggtacaccaaatagcaa

SEQ ID NO: 5583 - DNA, 45 bp, Artificial Sequence
  Description of Artificial Sequence: Synthetic primer
  Description of Combined DNA/RNA Molecule: Synthetic primer
tggcggtacaccaaatagcaacatctgcctggcagtggttggatt

SEQ ID NO: 5584 - DNA, 41 bp, Artificial Sequence
  Description of Artificial Sequence: Synthetic primer
  Description of Combined DNA/RNA Molecule: Synthetic primer
acgacgacgacgaacagccttccacacacagagccacatct

SEQ ID NO: 5585 - DNA, 41 bp, Artificial Sequence
  Description of Artificial Sequence: Synthetic primer
  Description of Combined DNA/RNA Molecule: Synthetic primer
acgacgacgacgaacatccccagccttccacacacagagct

SEQ ID NO: 5586 - DNA, 61 bp, Artificial Sequence
  Description of Artificial Sequence: Synthetic primer
  Description of Combined DNA/RNA Molecule: Synthetic primer
acgacgacgacttgacgaacataatcctggaatggacctgactatgtacagtgttcctgcc

SEQ ID NO: 5587 - DNA, 46 bp, Artificial Sequence
  Description of Artificial Sequence: Synthetic oligonucleotide
  Description of Combined DNA/RNA Molecule: Synthetic oligonucleotide
tccaaacgattaggagcgtcaacatcccaccccaccctacactgag

SEQ ID NO: 5588 - DNA, 50 bp, Artificial Sequence
  Description of Artificial Sequence: Synthetic oligonucleotide
ctggactggttcaagcttccacctcagcattggacagaggtatacgccca

SEQ ID NO: 5589 - DNA, 29 bp, Artificial Sequence
  Description of Artificial Sequence: Synthetic probe
ttccctacactggactggttcaagcttcc

SEQ ID NO: 5590 - DNA, 22 bp, Artificial Sequence
  Description of Artificial Sequence: Synthetic primer
tccaaacgattaggagcgtcaa

SEQ ID NO: 5591 - DNA, 21 bp, Artificial Sequence
  Description of Artificial Sequence: Synthetic primer
tgggcgtatacctctgtccaa

SEQ ID NO: 5592 - DNA, 53 bp, Artificial Sequence
  Description of Artificial Sequence: Synthetic primer
  Description of Combined DNA/RNA Molecule: Synthetic primer
tgggcgtatacctctgtccaagacctgactatgtacagtgttcctgttgaggc

SEQ ID NO: 5593 - DNA, 41 bp, Artificial Sequence
  Description of Artificial Sequence: Synthetic primer
  Description of Combined DNA/RNA Molecule: Synthetic primer
acgacgacgacgaacagaaacaaccccacaccagcaccccg

SEQ ID NO: 5594 - DNA, 38 bp, Artificial Sequence
  Description of Artificial Sequence: Synthetic primer
  Description of Combined DNA/RNA Molecule: Synthetic primer
acgacgacgacgaacaaccccacaccagcaccccatct

SEQ ID NO: 5595 - DNA, 53 bp, Artificial Sequence
  Description of Artificial Sequence: Synthetic primer
  Description of Combined DNA/RNA Molecule: Synthetic primer
acgacgacgacttgacgaacataatgcctgcctgctcctctggaaatcuggga

SEQ ID NO: 5596 - DNA, 46 bp, Artificial Sequence
  Description of Artificial Sequence: Synthetic oligonucleotide
  Description of Combined DNA/RNA Molecule: Synthetic oligonucleotide
tccaaacgattaggagcgtcaatgcagccagtgcctccgcaccctg

SEQ ID NO: 5597 - DNA, 44 bp, Artificial Sequence
  Description of Artificial Sequence: Synthetic oligonucleotide
ccccagctccagtccccaccatcttggacagaggtatacgccca

SEQ ID NO: 5598 - DNA, 23 bp, Artificial Sequence
  Description of Artificial Sequence: Synthetic probe
ttctccgcaccccagctccagtc

SEQ ID NO: 5599 - DNA, 22 bp, Artificial Sequence
  Description of Artificial Sequence: Synthetic primer
tccaaacgattaggagcgtcaa

SEQ ID NO: 5600 - DNA, 21 bp, Artificial Sequence
  Description of Artificial Sequence: Synthetic primer
tgggcgtatacctctgtccaa

SEQ ID NO: 5601 - DNA, 48 bp, Artificial Sequence
  Description of Artificial Sequence: Synthetic primer
  Description of Combined DNA/RNA Molecule: Synthetic primer
tgggcgtatacctctgtccaatctggaaatctgaggtgggaatggtga

SEQ ID NO: 5602 - DNA, 51 bp, Artificial Sequence
  Description of Artificial Sequence: Synthetic primer
  Description of Combined DNA/RNA Molecule: Synthetic primer
acgacgacgacgaagcaactctagattcttcccacaaagatatgcaugcta

SEQ ID NO: 5603 - DNA, 48 bp, Artificial Sequence
  Description of Artificial Sequence: Synthetic primer
  Description of Combined DNA/RNA Molecule: Synthetic primer
acgacgacgacgaagattcttcccacaaagatatgcatgctgcuttct

SEQ ID NO: 5604 - DNA, 56 bp, Artificial Sequence
  Description of Artificial Sequence: Synthetic primer
  Description of Combined DNA/RNA Molecule: Synthetic primer
acgacgacgacttgacgaacataatctgaagttgctaagtgcctgagtgcagtgta

SEQ ID NO: 5605 - DNA, 48 bp, Artificial Sequence
  Description of Artificial Sequence: Synthetic oligonucleotide
  Description of Combined DNA/RNA Molecule: Synthetic oligonucleotide
tcgtcccggtcagtagtcaacatcactagcaccccaagagtcaggttg

SEQ ID NO: 5606 - DNA, 61 bp, Artificial Sequence
  Description of Artificial Sequence: Synthetic oligonucleotide
ggtcaggttcacttactaccaagacttctctacttaacacattgcccattttctgcaccca

SEQ ID NO: 5607 - DNA, 33 bp, Artificial Sequence
  Description of Artificial Sequence: Synthetic probe
ttagagtcaggtcaggttcacttactaccaaga

SEQ ID NO: 5608 - DNA, 20 bp, Artificial Sequence
  Description of Artificial Sequence: Synthetic primer
tcgtcccggtcagtagtcaa

SEQ ID NO: 5609 - DNA, 20 bp, Artificial Sequence
  Description of Artificial Sequence: Synthetic primer
tgggtgcagaaaatgggcaa

SEQ ID NO: 5610 - DNA, 50 bp, Artificial Sequence
  Description of Artificial Sequence: Synthetic primer
  Description of Combined DNA/RNA Molecule: Synthetic primer
tgggtgcagaaaatgggcaagttgctaagtgcctgagtgcagtatgttag

SEQ ID NO: 5611 - DNA, 46 bp, Artificial Sequence
  Description of Artificial Sequence: Synthetic primer
  Description of Combined DNA/RNA Molecule: Synthetic primer
acgacgacgacgaacagttcagctttcttttgcaaaggccaagatt

SEQ ID NO: 5612 - DNA, 47 bp, Artificial Sequence
  Description of Artificial Sequence: Synthetic primer
  Description of Combined DNA/RNA Molecule: Synthetic primer
acgacgacgacgaatcagctttcttttgcaaaggccaagatcugggt

SEQ ID NO: 5613 - DNA, 49 bp, Artificial Sequence
  Description of Artificial Sequence: Synthetic primer
  Description of Combined DNA/RNA Molecule: Synthetic primer
acgacgacgacttgacgaacataattgaggacatgtgagggtgcugtga

SEQ ID NO: 5614 - DNA, 47 bp, Artificial Sequence
  Description of Artificial Sequence: Synthetic oligonucleotide
  Description of Combined DNA/RNA Molecule: Synthetic oligonucleotide
ttcgtgcgtcgtgtagcaagcctgcccaagtcctctatcgcaggttt

SEQ ID NO: 5615 - DNA, 46 bp, Artificial Sequence
  Description of Artificial Sequence: Synthetic oligonucleotide
ggtccacatggccaccaatgacccacttgcccattttctgcaccca

SEQ ID NO: 5616 - DNA, 25 bp, Artificial Sequence
  Description of Artificial Sequence: Synthetic probe
aatatcgcaggtccacatggccacc

SEQ ID NO: 5617 - DNA, 19 bp, Artificial Sequence
  Description of Artificial Sequence: Synthetic primer
ttcgtgcgtcgtgtagcaa

SEQ ID NO: 5618 - DNA, 20 bp, Artificial Sequence
  Description of Artificial Sequence: Synthetic primer
tgggtgcagaaaatgggcaa

SEQ ID NO: 5619 - DNA, 45 bp, Artificial Sequence
  Description of Artificial Sequence: Synthetic primer
  Description of Combined DNA/RNA Molecule: Synthetic primer
tgggtgcagaaaatgggcaagggacatgtgagggtgctatgggtt

SEQ ID NO: 5620 - DNA, 47 bp, Artificial Sequence
  Description of Artificial Sequence: Synthetic primer
  Description of Combined DNA/RNA Molecule: Synthetic primer
acgacgacgacgaaatcaaaaccactaagagttcctcccacacagat

SEQ ID NO: 5621 - DNA, 46 bp, Artificial Sequence
  Description of Artificial Sequence: Synthetic primer
  Description of Combined DNA/RNA Molecule: Synthetic primer
acgacgacgacgaaaccactaagagttcctcccacacagacugcta

SEQ ID NO: 5622 - DNA, 51 bp, Artificial Sequence
  Description of Artificial Sequence: Synthetic primer
  Description of Combined DNA/RNA Molecule: Synthetic primer
acgacgacgacttgacgaacataatgtgcactctgctgaggtggaagaaac

SEQ ID NO: 5623 - DNA, 47 bp, Artificial Sequence
  Description of Artificial Sequence: Synthetic oligonucleotide
  Description of Combined DNA/RNA Molecule: Synthetic oligonucleotide
ttcgtgcgtcgtgtagcaagctgccctcaattttgctccgcacctgt

SEQ ID NO: 5624 - DNA, 42 bp, Artificial Sequence
  Description of Artificial Sequence: Synthetic oligonucleotide
cctgccagccagagcctcccagttgcccattttctgcaccca

SEQ ID NO: 5625 - DNA, 23 bp, Artificial Sequence
  Description of Artificial Sequence: Synthetic probe
aactccgcacctgccagccagag

SEQ ID NO: 5626 - DNA, 19 bp, Artificial Sequence
  Description of Artificial Sequence: Synthetic primer
ttcgtgcgtcgtgtagcaa

SEQ ID NO: 5627 - DNA, 20 bp, Artificial Sequence
  Description of Artificial Sequence: Synthetic primer
tgggtgcagaaaatgggcaa

SEQ ID NO: 5628 - DNA, 49 bp, Artificial Sequence
  Description of Artificial Sequence: Synthetic primer
  Description of Combined DNA/RNA Molecule: Synthetic primer
tgggtgcagaaaatgggcaactctgctgaggtggaagaaatgttgggaa

SEQ ID NO: 5629 - DNA, 42 bp, Artificial Sequence
  Description of Artificial Sequence: Synthetic primer
  Description of Combined DNA/RNA Molecule: Synthetic primer
acgacgacgacgaagtcctagtgccctggtcaagacagttcc

SEQ ID NO: 5630 - DNA, 46 bp, Artificial Sequence
  Description of Artificial Sequence: Synthetic primer
  Description of Combined DNA/RNA Molecule: Synthetic primer
acgacgacgacgaacctagtgccctggtcaagacagttctaucctc

SEQ ID NO: 5631 - DNA, 55 bp, Artificial Sequence
  Description of Artificial Sequence: Synthetic primer
  Description of Combined DNA/RNA Molecule: Synthetic primer
acgacgacgacttgacgaacataatacttctaagggcctggctgttgtcaugacc

SEQ ID NO: 5632 - DNA, 48 bp, Artificial Sequence
  Description of Artificial Sequence: Synthetic oligonucleotide
  Description of Combined DNA/RNA Molecule: Synthetic oligonucleotide
tggcgtaaggacactctgaaacgccagaaagagctgggtctcagggat

SEQ ID NO: 5633 - DNA, 43 bp, Artificial Sequence
  Description of Artificial Sequence: Synthetic oligonucleotide
ggagcaggagacagactgagaggcgtttcctctgtgcggacca

SEQ ID NO: 5634 - DNA, 23 bp, Artificial Sequence
  Description of Artificial Sequence: Synthetic probe
aaggtctcaggagcaggagacag

SEQ ID NO: 5635 - DNA, 22 bp, Artificial Sequence
  Description of Artificial Sequence: Synthetic primer
tggcgtaaggacactctgaaac

SEQ ID NO: 5636 - DNA, 19 bp, Artificial Sequence
  Description of Artificial Sequence: Synthetic primer
tggtccgcacagaggaaac

SEQ ID NO: 5637 - DNA, 49 bp, Artificial Sequence
  Description of Artificial Sequence: Synthetic primer
  Description of Combined DNA/RNA Molecule: Synthetic primer
tggtccgcacagaggaaaccttctaagggcctggctgttgtcgtgacta

SEQ ID NO: 5638 - DNA, 42 bp, Artificial Sequence
  Description of Artificial Sequence: Synthetic primer
  Description of Combined DNA/RNA Molecule: Synthetic primer
acgacgacgacgaagtttgaggtcaccctggagaccagcctt

SEQ ID NO: 5639 - DNA, 40 bp, Artificial Sequence
  Description of Artificial Sequence: Synthetic primer
  Description of Combined DNA/RNA Molecule: Synthetic primer
acgacgacgacgaagtcaccctggagaccagcctcagagc

SEQ ID NO: 5640 - DNA, 53 bp, Artificial Sequence
  Description of Artificial Sequence: Synthetic primer
  Description of Combined DNA/RNA Molecule: Synthetic primer
acgacgacgacttgacgaacataatgacactgtgtgtggtgtggctccugtgc

SEQ ID NO: 5641 - DNA, 46 bp, Artificial Sequence
  Description of Artificial Sequence: Synthetic oligonucleotide
  Description of Combined DNA/RNA Molecule: Synthetic oligonucleotide
tcacgcacgtagggtctaaacccagggagagtgcacagacagccgt

SEQ ID NO: 5642 - DNA, 45 bp, Artificial Sequence
  Description of Artificial Sequence: Synthetic oligonucleotide
gccaccagctgaatgaagcctgggagttgtccggctgtggttaca

SEQ ID NO: 5643 - DNA, 28 bp, Artificial Sequence
  Description of Artificial Sequence: Synthetic probe
aaacagacagccaccagctgaatgaagc

SEQ ID NO: 5644 - DNA, 21 bp, Artificial Sequence
  Description of Artificial Sequence: Synthetic primer
tcacgcacgtagggtctaaac

SEQ ID NO: 5645 - DNA, 20 bp, Artificial Sequence
  Description of Artificial Sequence: Synthetic primer
tgtaaccacagccggacaac

SEQ ID NO: 5646 - DNA, 47 bp, Artificial Sequence
  Description of Artificial Sequence: Synthetic primer
  Description of Combined DNA/RNA Molecule: Synthetic primer
tgtaaccacagccggacaacctgtgtgtggtgtggctcctatgtcca

SEQ ID NO: 5647 - DNA, 42 bp, Artificial Sequence
  Description of Artificial Sequence: Synthetic primer
  Description of Combined DNA/RNA Molecule: Synthetic primer
acgacgacgacgaactcccacacctcactgcacatcacaccc

SEQ ID NO: 5648 - DNA, 43 bp, Artificial Sequence
  Description of Artificial Sequence: Synthetic primer
  Description of Combined DNA/RNA Molecule: Synthetic primer
acgacgacgacgaaccacacctcactgcacatcacaccugagt

SEQ ID NO: 5649 - DNA, 52 bp, Artificial Sequence
  Description of Artificial Sequence: Synthetic primer
  Description of Combined DNA/RNA Molecule: Synthetic primer
acgacgacgacttgacgaacataatccttggctagagtgggagtggcutggc

SEQ ID NO: 5650 - DNA, 51 bp, Artificial Sequence
  Description of Artificial Sequence: Synthetic oligonucleotide
  Description of Combined DNA/RNA Molecule: Synthetic oligonucleotide
tcttacgcccagggaatgtaaccccaccacaaccacatcacacccactgtg

SEQ ID NO: 5651 - DNA, 45 bp, Artificial Sequence
  Description of Artificial Sequence: Synthetic oligonucleotide
ctgcaacccattcagaccccccagagttgtccggctgtggttaca

SEQ ID NO: 5652 - DNA, 26 bp, Artificial Sequence
  Description of Artificial Sequence: Synthetic probe
aaacacccactgcaacccattcagac

SEQ ID NO: 5653 - DNA, 22 bp, Artificial Sequence
  Description of Artificial Sequence: Synthetic primer
tcttacgcccagggaatgtaac

SEQ ID NO: 5654 - DNA, 20 bp, Artificial Sequence
  Description of Artificial Sequence: Synthetic primer
tgtaaccacagccggacaac

SEQ ID NO: 5655 - DNA, 47 bp, Artificial Sequence
  Description of Artificial Sequence: Synthetic primer
  Description of Combined DNA/RNA Molecule: Synthetic primer
tgtaaccacagccggacaacgctagagtgggagtggcttgatgtttt

SEQ ID NO: 5656 - DNA, 38 bp, Artificial Sequence
  Description of Artificial Sequence: Synthetic primer
  Description of Combined DNA/RNA Molecule: Synthetic primer
acgacgacgacgaacaccatccccactgggccacagcg

SEQ ID NO: 5657 - DNA, 41 bp, Artificial Sequence
  Description of Artificial Sequence: Synthetic primer
  Description of Combined DNA/RNA Molecule: Synthetic primer
acgacgacgacgaacaccatcagcaccatccccactgggct

SEQ ID NO: 5658 - DNA, 49 bp, Artificial Sequence
  Description of Artificial Sequence: Synthetic primer
  Description of Combined DNA/RNA Molecule: Synthetic primer
acgacgacgacttgacgaacataatggtgatgtggcctgccacautgtt

SEQ ID NO: 5659 - DNA, 48 bp, Artificial Sequence
  Description of Artificial Sequence: Synthetic oligonucleotide
  Description of Combined DNA/RNA Molecule: Synthetic oligonucleotide
tgagcaaaatcttcgtcgacccagcagcaggttcccacacccagggcg

SEQ ID NO: 5660 - DNA, 47 bp, Artificial Sequence
  Description of Artificial Sequence: Synthetic oligonucleotide
gggtagcactccaggagcagttgtgccggttcgatgccttccgtaca

SEQ ID NO: 5661 - DNA, 26 bp, Artificial Sequence
  Description of Artificial Sequence: Synthetic probe
ttacacccagggtagcactccaggag

SEQ ID NO: 5662 - DNA, 21 bp, Artificial Sequence
  Description of Artificial Sequence: Synthetic primer
tgagcaaaatcttcgtcgacc

SEQ ID NO: 5663 - DNA, 20 bp, Artificial Sequence
  Description of Artificial Sequence: Synthetic primer
tgtacggaaggcatcgaacc

SEQ ID NO: 5664 - DNA, 48 bp, Artificial Sequence
  Description of Artificial Sequence: Synthetic primer
  Description of Combined DNA/RNA Molecule: Synthetic primer
tgtacggaaggcatcgaacccaggtgcttcctgaaggtgagttggcta

SEQ ID NO: 5665 - DNA, 42 bp, Artificial Sequence
  Description of Artificial Sequence: Synthetic primer
  Description of Combined DNA/RNA Molecule: Synthetic primer
acgacgacgacgaagtcagaggtgagtgatgctggcauacat

SEQ ID NO: 5666 - DNA, 44 bp, Artificial Sequence
  Description of Artificial Sequence: Synthetic primer
  Description of Combined DNA/RNA Molecule: Synthetic primer
acgacgacgacgaatcagaggtgagtgatgctggcatacaccaa

SEQ ID NO: 5667 - DNA, 51 bp, Artificial Sequence
  Description of Artificial Sequence: Synthetic primer
  Description of Combined DNA/RNA Molecule: Synthetic primer
acgacgacgacttgacgaacataatcccagactgtgctgccctttcutttc

SEQ ID NO: 5668 - DNA, 47 bp, Artificial Sequence
  Description of Artificial Sequence: Synthetic oligonucleotide
  Description of Combined DNA/RNA Molecule: Synthetic oligonucleotide
tggcacatgagagtagttgaccccaggcagtcagccaccgcaccctg

SEQ ID NO: 5669 - DNA, 45 bp, Artificial Sequence
  Description of Artificial Sequence: Synthetic oligonucleotide
ccccagtctccagacccactgggagggttcgatgccttccgtaca

SEQ ID NO: 5670 - DNA, 24 bp, Artificial Sequence
  Description of Artificial Sequence: Synthetic probe
ttcaccgcaccccagtctccagac

SEQ ID NO: 5671 - DNA, 22 bp, Artificial Sequence
  Description of Artificial Sequence: Synthetic primer
tggcacatgagagtagttgacc

SEQ ID NO: 5672 - DNA, 20 bp, Artificial Sequence
  Description of Artificial Sequence: Synthetic primer
tgtacggaaggcatcgaacc

SEQ ID NO: 5673 - DNA, 55 bp, Artificial Sequence
  Description of Artificial Sequence: Synthetic primer
  Description of Combined DNA/RNA Molecule: Synthetic primer
tgtacggaaggcatcgaaccctttctttttctgctcaaatagaggtctatgctct

SEQ ID NO: 5674 - DNA, 40 bp, Artificial Sequence
  Description of Artificial Sequence: Synthetic primer
  Description of Combined DNA/RNA Molecule: Synthetic primer
acgacgacgacgaacttccaccccagcagagtgcactgga

SEQ ID NO: 5675 - DNA, 42 bp, Artificial Sequence
  Description of Artificial Sequence: Synthetic primer
  Description of Combined DNA/RNA Molecule: Synthetic primer
acgacgacgacgaaagcatttcttccaccccagcagagtgcg

SEQ ID NO: 5676 - DNA, 48 bp, Artificial Sequence
  Description of Artificial Sequence: Synthetic primer
  Description of Combined DNA/RNA Molecule: Synthetic primer
acgacgacgacttgacgaacataatgtgcagggtgaggtgggaugtga

SEQ ID NO: 5677 - DNA, 44 bp, Artificial Sequence
  Description of Artificial Sequence: Synthetic oligonucleotide
  Description of Combined DNA/RNA Molecule: Synthetic oligonucleotide
tatagtcacgcaggaccacaggcccaccagaggagcgcaucctt

SEQ ID NO: 5678 - DNA, 45 bp, Artificial Sequence
  Description of Artificial Sequence: Synthetic oligonucleotide
tccccagccttccacacacagagctgtttgcggctgtctatgaca

SEQ ID NO: 5679 - DNA, 24 bp, Artificial Sequence
  Description of Artificial Sequence: Synthetic probe
ttgagcgcatccccagccttccac

SEQ ID NO: 5680 - DNA, 20 bp, Artificial Sequence
  Description of Artificial Sequence: Synthetic primer
tatagtcacgcaggaccaca

SEQ ID NO: 5681 - DNA, 21 bp, Artificial Sequence
  Description of Artificial Sequence: Synthetic primer
tgtcatagacagccgcaaaca

SEQ ID NO: 5682 - DNA, 45 bp, Artificial Sequence
  Description of Artificial Sequence: Synthetic primer
  Description of Combined DNA/RNA Molecule: Synthetic primer
tgtcatagacagccgcaaacagcagggtgaggtgggatatggctt

SEQ ID NO: 5683 - DNA, 41 bp, Artificial Sequence; identical to SEQ ID NO: 5297
  Description of Artificial Sequence: Synthetic primer
  Description of Combined DNA/RNA Molecule: Synthetic primer

SEQ ID NO: 5684 - DNA, 43 bp, Artificial Sequence
  Description of Artificial Sequence: Synthetic primer
  Description of Combined DNA/RNA Molecule: Synthetic primer
acgacgacgacgaactggaggcctccagacaatcagaagtgat

SEQ ID NO: 5685 - DNA, 52 bp, Artificial Sequence
  Description of Artificial Sequence: Synthetic primer
  Description of Combined DNA/RNA Molecule: Synthetic primer
acgacgacgacttgacgaacataattggccagcctagtggatggagaactga

SEQ ID NO: 5686 - DNA, 48 bp, Artificial Sequence
  Description of Artificial Sequence: Synthetic oligonucleotide
  Description of Combined DNA/RNA Molecule: Synthetic oligonucleotide
tgccctatcgaaaaggacaacagcatccaggtccatgaggtcagggac

SEQ ID NO: 5687 - DNA, 46 bp, Artificial Sequence
  Description of Artificial Sequence: Synthetic oligonucleotide
ggagtcagcccaccctaagactccctgtttgcggctgtctatgaca

SEQ ID NO: 5688 - DNA, 23 bp, Artificial Sequence
  Description of Artificial Sequence: Synthetic probe
ccgaggtcaggagtcagcccacc

SEQ ID NO: 5689 - DNA, 22 bp, Artificial Sequence
  Description of Artificial Sequence: Synthetic primer
tgccctatcgaaaaggacaaca

SEQ ID NO: 5690 - DNA, 21 bp, Artificial Sequence
  Description of Artificial Sequence: Synthetic primer
tgtcatagacagccgcaaaca

SEQ ID NO: 5691 - DNA, 49 bp, Artificial Sequence
  Description of Artificial Sequence: Synthetic primer
  Description of Combined DNA/RNA Molecule: Synthetic primer
tgtcatagacagccgcaaacagccagcctagtggatggagaattgggat

SEQ ID NO: 5692 - DNA, 50 bp, Artificial Sequence
  Description of Artificial Sequence: Synthetic primer
  Description of Combined DNA/RNA Molecule: Synthetic primer
acgacgacgacgaagcatccattctcaggtactgaaagttttccaggctt

SEQ ID NO: 5693 - DNA, 44 bp, Artificial Sequence
  Description of Artificial Sequence: Synthetic primer
  Description of Combined DNA/RNA Molecule: Synthetic primer
acgacgacgacgaacctcacagctctgcatccattctcaggtat

SEQ ID NO: 5694 - DNA, 57 bp, Artificial Sequence
  Description of Artificial Sequence: Synthetic primer
  Description of Combined DNA/RNA Molecule: Synthetic primer
acgacgacgacttgacgaacataatcttcttggtcaaggacatcctgtgactggagc

SEQ ID NO: 5695 - DNA, 49 bp, Artificial Sequence
  Description of Artificial Sequence: Synthetic oligonucleotide
  Description of Combined DNA/RNA Molecule: Synthetic oligonucleotide
taatctccagacctccgaacccttccacacccacagatgtgacaaagtt

SEQ ID NO: 5696 - DNA, 46 bp, Artificial Sequence
  Description of Artificial Sequence: Synthetic oligonucleotide
aagccacagggcagctccactcacggtgtaaggattgaacgggaca

SEQ ID NO: 5697 - DNA, 24 bp, Artificial Sequence
  Description of Artificial Sequence: Synthetic probe
tttgtgacaaagccacagggcagc

SEQ ID NO: 5698 - DNA, 21 bp, Artificial Sequence
  Description of Artificial Sequence: Synthetic primer
taatctccagacctccgaacc

SEQ ID NO: 5699 - DNA, 22 bp, Artificial Sequence
  Description of Artificial Sequence: Synthetic primer
tgtcccgttcaatccttacacc

SEQ ID NO: 5700 - DNA, 52 bp, Artificial Sequence
  Description of Artificial Sequence: Synthetic primer
  Description of Combined DNA/RNA Molecule: Synthetic primer
tgtcccgttcaatccttacaccgacatcctgtgactggagtgtgaatggagt

SEQ ID NO: 5701 - DNA, 44 bp, Artificial Sequence
  Description of Artificial Sequence: Synthetic primer
  Description of Combined DNA/RNA Molecule: Synthetic primer
acgacgacgacgaaatggagctttgtgaagatgcaggcautgga

SEQ ID NO: 5702 - DNA, 45 bp, Artificial Sequence
  Description of Artificial Sequence: Synthetic primer
  Description of Combined DNA/RNA Molecule: Synthetic primer
acgacgacgacgaacagagcccacaatggagctttgtgaagatgt

SEQ ID NO: 5703 - DNA, 54 bp, Artificial Sequence
  Description of Artificial Sequence: Synthetic primer
  Description of Combined DNA/RNA Molecule: Synthetic primer
acgacgacgacttgacgaacataatgagtgctggtgtggtctgaaaggcucttt

SEQ ID NO: 5704 - DNA, 51 bp, Artificial Sequence
  Description of Artificial Sequence: Synthetic oligonucleotide
  Description of Combined DNA/RNA Molecule: Synthetic oligonucleotide
ttcgctgcccggttaaacaggctgctcagcaatgatgacatcaccaugttg

SEQ ID NO: 5705 - DNA, 46 bp, Artificial Sequence
  Description of Artificial Sequence: Synthetic oligonucleotide
tgtcacacacaggagccagctgcctgttatcggacctagctcgaca

SEQ ID NO: 5706 - DNA, 27 bp, Artificial Sequence
  Description of Artificial Sequence: Synthetic probe
ttatcaccatgtcacacacaggagcca

SEQ ID NO: 5707 - DNA, 19 bp, Artificial Sequence
  Description of Artificial Sequence: Synthetic primer
ttcgctgcccggttaaaca

SEQ ID NO: 5708 - DNA, 22 bp, Artificial Sequence
  Description of Artificial Sequence: Synthetic primer
tgtcgagctaggtccgataaca

SEQ ID NO: 5709 - DNA, 54 bp, Artificial Sequence
  Description of Artificial Sequence: Synthetic primer
  Description of Combined DNA/RNA Molecule: Synthetic primer
tgtcgagctaggtccgataacactgaaaggctcttctcttaaaccccttggcaa

SEQ ID NO: 5710 - DNA, 47 bp, Artificial Sequence; identical to SEQ ID NO: 632
  Description of Artificial Sequence: Synthetic primer
  Description of Combined DNA/RNA Molecule: Synthetic primer

SEQ ID NO: 5711 - DNA, 39 bp, Artificial Sequence; identical to SEQ ID NO: 633
  Description of Artificial Sequence: Synthetic primer
  Description of Combined DNA/RNA Molecule: Synthetic primer

SEQ ID NO: 5712 - DNA, 57 bp, Artificial Sequence
  Description of Artificial Sequence: Synthetic primer
  Description of Combined DNA/RNA Molecule: Synthetic primer
acgacgacgacttgacgaacataatgcttctctgaggtgtgttcactggatcgttcg

SEQ ID NO: 5713 - DNA, 48 bp, Artificial Sequence
  Description of Artificial Sequence: Synthetic oligonucleotide
  Description of Combined DNA/RNA Molecule: Synthetic oligonucleotide
ttcgctgcccggttaaacaggagggacaacaactcccctcgcacctct

SEQ ID NO: 5714 - DNA, 49 bp, Artificial Sequence
  Description of Artificial Sequence: Synthetic oligonucleotide
ccttcatggccccaactcagcactctgtgttatcggacctagctcgaca

SEQ ID NO: 5715 - DNA, 24 bp, Artificial Sequence
  Description of Artificial Sequence: Synthetic probe
ttcctcgcaccttcatggccccaa

SEQ ID NO: 5716 - DNA, 19 bp, Artificial Sequence
  Description of Artificial Sequence: Synthetic primer
ttcgctgcccggttaaaca

SEQ ID NO: 5717 - DNA, 22 bp, Artificial Sequence
  Description of Artificial Sequence: Synthetic primer
tgtcgagctaggtccgataaca

SEQ ID NO: 5718 - DNA, 56 bp, Artificial Sequence
  Description of Artificial Sequence: Synthetic primer
  Description of Combined DNA/RNA Molecule: Synthetic primer
tgtcgagctaggtccgataacagttcactggatcagagatagcagagtgttgagtc

SEQ ID NO: 5719 - DNA, 39 bp, Artificial Sequence
  Description of Artificial Sequence: Synthetic primer
  Description of Combined DNA/RNA Molecule: Synthetic primer
acgacgacgacgaagcaaaagcccccatctgccautccc

SEQ ID NO: 5720 - DNA, 42 bp, Artificial Sequence
  Description of Artificial Sequence: Synthetic primer
  Description of Combined DNA/RNA Molecule: Synthetic primer
acgacgacgacgaacaaaagcccccatctgccattccuggtc

SEQ ID NO: 5721 - DNA, 55 bp, Artificial Sequence
  Description of Artificial Sequence: Synthetic primer
  Description of Combined DNA/RNA Molecule: Synthetic primer
acgacgacgacttgacgaacataatgagaggtgcctgctgtgactctttcaaaat

SEQ ID NO: 5722 - DNA, 44 bp, Artificial Sequence
  Description of Artificial Sequence: Synthetic oligonucleotide
  Description of Combined DNA/RNA Molecule: Synthetic oligonucleotide
tgctatgccgcattcaaccatgaggcccagaaatggacaaggcg

SEQ ID NO: 5723 - DNA, 48 bp, Artificial Sequence
  Description of Artificial Sequence: Synthetic oligonucleotide
aggaaggcctctggctcatcacaagagtgtggagctagttcggcgaca

SEQ ID NO: 5724 - DNA, 28 bp, Artificial Sequence
  Description of Artificial Sequence: Synthetic probe
ttatggacaaggaaggcctctggctcat

SEQ ID NO: 5725 - DNA, 20 bp, Artificial Sequence
  Description of Artificial Sequence: Synthetic primer
tgctatgccgcattcaacca

SEQ ID NO: 5726 - DNA, 19 bp, Artificial Sequence
  Description of Artificial Sequence: Synthetic primer
tgtcgccgaactagctcca

SEQ ID NO: 5727 - DNA, 54 bp, Artificial Sequence
  Description of Artificial Sequence: Synthetic primer
  Description of Combined DNA/RNA Molecule: Synthetic primer
tgtcgccgaactagctccacctgctgtgactctttcaaaacacactcctgtgac

SEQ ID NO: 5728 - DNA, 39 bp, Artificial Sequence
  Description of Artificial Sequence: Synthetic primer
  Description of Combined DNA/RNA Molecule: Synthetic primer
acgacgacgacgaagcacagggcctgtgctttcautgcg

SEQ ID NO: 5729 - DNA, 36 bp, Artificial Sequence
  Description of Artificial Sequence: Synthetic primer
  Description of Combined DNA/RNA Molecule: Synthetic primer
acgacgacgacgaacacccaggcacagggccugtgt

SEQ ID NO: 5730 - DNA, 51 bp, Artificial Sequence
  Description of Artificial Sequence: Synthetic primer
  Description of Combined DNA/RNA Molecule: Synthetic primer
acgacgacgacttgacgaacataatcctggaggctccctttctgccctgga

SEQ ID NO: 5731 - DNA, 48 bp, Artificial Sequence
  Description of Artificial Sequence: Synthetic oligonucleotide
  Description of Combined DNA/RNA Molecule: Synthetic oligonucleotide
tgtgccttacggaaaacccacaggcaaggaagtggagcacgcactgtg

SEQ ID NO: 5732 - DNA, 48 bp, Artificial Sequence
  Description of Artificial Sequence: Synthetic oligonucleotide
ctgcagattcagcacagggctagaggaggtggagctagttcggcgaca

SEQ ID NO: 5733 - DNA, 26 bp, Artificial Sequence
  Description of Artificial Sequence: Synthetic probe
ttgcacgcactgcagattcagcacag

SEQ ID NO: 5734 - DNA, 20 bp, Artificial Sequence
  Description of Artificial Sequence: Synthetic primer
tgtgccttacggaaaaccca

SEQ ID NO: 5735 - DNA, 19 bp, Artificial Sequence
  Description of Artificial Sequence: Synthetic primer
tgtcgccgaactagctcca

SEQ ID NO: 5736 - DNA, 44 bp, Artificial Sequence
  Description of Artificial Sequence: Synthetic primer
  Description of Combined DNA/RNA Molecule: Synthetic primer
tgtcgccgaactagctccaggaggctccctttctgccttgggac

SEQ ID NO: 5737 - DNA, 44 bp, Artificial Sequence
  Description of Artificial Sequence: Synthetic primer
  Description of Combined DNA/RNA Molecule: Synthetic primer
acgacgacgacgaaccacctggcacagatataagcagcagcccg

SEQ ID NO: 5738 - DNA, 43 bp, Artificial Sequence
  Description of Artificial Sequence: Synthetic primer
  Description of Combined DNA/RNA Molecule: Synthetic primer
acgacgacgacgaaggcacagatataagcagcagcccauctgg

SEQ ID NO: 5739 - DNA, 52 bp, Artificial Sequence
  Description of Artificial Sequence: Synthetic primer
  Description of Combined DNA/RNA Molecule: Synthetic primer
acgacgacgacttgacgaacataattctgggatctgaggacttgggauctgt

SEQ ID NO: 5740 - DNA, 45 bp, Artificial Sequence
  Description of Artificial Sequence: Synthetic oligonucleotide
  Description of Combined DNA/RNA Molecule: Synthetic oligonucleotide
tcctgctctgaaaacctacaccgggctcagcaggcactcagggct

SEQ ID NO: 5741 - DNA, 49 bp, Artificial Sequence
  Description of Artificial Sequence: Synthetic oligonucleotide
gggtcctcagcactgcagactcctgacggttacataggcggcttagaca

SEQ ID NO: 5742 - DNA, 25 bp, Artificial Sequence
  Description of Artificial Sequence: Synthetic probe
ttgcactcagggtcctcagcactgc

SEQ ID NO: 5743 - DNA, 22 bp, Artificial Sequence
  Description of Artificial Sequence: Synthetic primer
tcctgctctgaaaacctacacc

SEQ ID NO: 5744 - DNA, 22 bp, Artificial Sequence
  Description of Artificial Sequence: Synthetic primer
tgtctaagccgcctatgtaacc

SEQ ID NO: 5745 - DNA, 50 bp, Artificial Sequence
  Description of Artificial Sequence: Synthetic primer
  Description of Combined DNA/RNA Molecule: Synthetic primer
tgtctaagccgcctatgtaaccctgaggacttgggatctgcagctggcaa

SEQ ID NO: 5746 - DNA, 52 bp, Artificial Sequence; identical to SEQ ID NO: 4564
  Description of Artificial Sequence: Synthetic primer
  Description of Combined DNA/RNA Molecule: Synthetic primer

SEQ ID NO: 5747 - DNA, 54 bp, Artificial Sequence; identical to SEQ ID NO: 4565
  Description of Artificial Sequence: Synthetic primer
  Description of Combined DNA/RNA Molecule: Synthetic primer

SEQ ID NO: 5748 - DNA, 51 bp, Artificial Sequence; identical to SEQ ID NO: 4566
  Description of Artificial Sequence: Synthetic primer
  Description of Combined DNA/RNA Molecule: Synthetic primer

SEQ ID NO: 5749 - DNA, 45 bp, Artificial Sequence; identical to SEQ ID NO: 4567
  Description of Artificial Sequence: Synthetic oligonucleotide
  Description of Combined DNA/RNA Molecule: Synthetic oligonucleotide

SEQ ID NO: 5750 - DNA, 52 bp, Artificial Sequence; identical to SEQ ID NO: 4568
  Description of Artificial Sequence: Synthetic oligonucleotide

SEQ ID NO: 5751 - DNA, 32 bp, Artificial Sequence; identical to SEQ ID NO: 4569
  Description of Artificial Sequence: Synthetic probe

SEQ ID NO: 5752 - DNA, 20 bp, Artificial Sequence
  Description of Artificial Sequence: Synthetic primer
tttttacgcacagcaccacc

SEQ ID NO: 5753 - DNA, 22 bp, Artificial Sequence
  Description of Artificial Sequence: Synthetic primer
tgtctaagccgcctatgtaacc

SEQ ID NO: 5754 - DNA, 48 bp, Artificial Sequence; identical to SEQ ID NO: 4572
  Description of Artificial Sequence: Synthetic primer
  Description of Combined DNA/RNA Molecule: Synthetic primer

SEQ ID NO: 5755 - DNA, 39 bp, Artificial Sequence
  Description of Artificial Sequence: Synthetic primer
  Description of Combined DNA/RNA Molecule: Synthetic primer
acgacgacgacgaagcagaggcacctggagctcacagga

SEQ ID NO: 5756 - DNA, 38 bp, Artificial Sequence
  Description of Artificial Sequence: Synthetic primer
acgacgacgacgaaaccacagggcagaggcacctggaa

SEQ ID NO: 5757 - DNA, 55 bp, Artificial Sequence
  Description of Artificial Sequence: Synthetic primer
  Description of Combined DNA/RNA Molecule: Synthetic primer
acgacgacgacttgacgaacataatgacctggaagtgtgtggtaaagtgcuggga

SEQ ID NO: 5758 - DNA, 50 bp, Artificial Sequence
  Description of Artificial Sequence: Synthetic oligonucleotide
  Description of Combined DNA/RNA Molecule: Synthetic oligonucleotide
tggacacttcgcccttcttaaccactgactgcaggcaagcattcaggaaa

SEQ ID NO: 5759 - DNA, 42 bp, Artificial Sequence
  Description of Artificial Sequence: Synthetic oligonucleotide
ggagaggcagccaggcaaagcgtttgggatctgggcatcaca

SEQ ID NO: 5760 - DNA, 24 bp, Artificial Sequence
  Description of Artificial Sequence: Synthetic probe
ttgcattcaggagaggcagccagg

SEQ ID NO: 5761 - DNA, 22 bp, Artificial Sequence
  Description of Artificial Sequence: Synthetic primer
tggacacttcgcccttcttaac

SEQ ID NO: 5762 - DNA, 21 bp, Artificial Sequence
  Description of Artificial Sequence: Synthetic primer
tgtgatgcccagatcccaaac

SEQ ID NO: 5763 - DNA, 50 bp, Artificial Sequence
  Description of Artificial Sequence: Synthetic primer
  Description of Combined DNA/RNA Molecule: Synthetic primer
tgtgatgcccagatcccaaactgtgtggtaaagtgctgaggctctgccta

SEQ ID NO: 5764 - DNA, 40 bp, Artificial Sequence; identical to SEQ ID NO: 5478
  Description of Artificial Sequence: Synthetic primer
  Description of Combined DNA/RNA Molecule: Synthetic primer

SEQ ID NO: 5765 - DNA, 39 bp, Artificial Sequence
  Description of Artificial Sequence: Synthetic primer
  Description of Combined DNA/RNA Molecule: Synthetic primer
acgacgacgacgaatgagctctgccctgacagcaugcat

SEQ ID NO: 5766 - DNA, 57 bp, Artificial Sequence
  Description of Artificial Sequence: Synthetic primer
  Description of Combined DNA/RNA Molecule: Synthetic primer
acgacgacgacttgacgaacataatatgtgaggtacttcatgaaactgagcccattc

SEQ ID NO: 5767 - DNA, 48 bp, Artificial Sequence
  Description of Artificial Sequence: Synthetic oligonucleotide
  Description of Combined DNA/RNA Molecule: Synthetic oligonucleotide
tggaggccggagaaattaaaccccccacttctgtgagagcgcactttt

SEQ ID NO: 5768 - DNA, 57 bp, Artificial Sequence
  Description of Artificial Sequence: Synthetic oligonucleotide
cttcctggcatgggagtcaaatcatgtcaataaaatgtttgggatctgggcatcaca

SEQ ID NO: 5769 - DNA, 23 bp, Artificial Sequence
  Description of Artificial Sequence: Synthetic probe
ttgagcgcacttcctggcatggg

SEQ ID NO: 5770 - DNA, 21 bp, Artificial Sequence
  Description of Artificial Sequence: Synthetic primer
tggaggccggagaaattaaac

SEQ ID NO: 5771 - DNA, 21 bp, Artificial Sequence
  Description of Artificial Sequence: Synthetic primer
tgtgatgcccagatcccaaac

SEQ ID NO: 5772 - DNA, 59 bp, Artificial Sequence
  Description of Artificial Sequence: Synthetic primer
  Description of Combined DNA/RNA Molecule: Synthetic primer
tgtgatgcccagatcccaaaccatgaaactgagcccattttattgacatgatctgacct

SEQ ID NO: 5773 - DNA, 41 bp, Artificial Sequence
  Description of Artificial Sequence: Synthetic primer
  Description of Combined DNA/RNA Molecule: Synthetic primer
acgacgacgacgaacatacacagcactcaccccccagccct

SEQ ID NO: 5774 - DNA, 38 bp, Artificial Sequence
  Description of Artificial Sequence: Synthetic primer
  Description of Combined DNA/RNA Molecule: Synthetic primer
acgacgacgacgaacagcactcaccccccagcccccaa

SEQ ID NO: 5775 - DNA, 50 bp, Artificial Sequence
  Description of Artificial Sequence: Synthetic primer
  Description of Combined DNA/RNA Molecule: Synthetic primer
acgacgacgacttgacgaacataatgcagctgtgggcatctgtgguggta

SEQ ID NO: 5776 - DNA, 46 bp, Artificial Sequence
  Description of Artificial Sequence: Synthetic oligonucleotide
  Description of Combined DNA/RNA Molecule: Synthetic oligonucleotide
ttgtctctgcgacccatcaacccagctcaggccacaagccacagtc

SEQ ID NO: 5777 - DNA, 42 bp, Artificial Sequence
  Description of Artificial Sequence: Synthetic oligonucleotide
cagctccctgccaccactcccacttggtacacgttcggcaca

SEQ ID NO: 5778 - DNA, 23 bp, Artificial Sequence
  Description of Artificial Sequence: Synthetic probe
ttcaagccacagctccctgccac

SEQ ID NO: 5779 - DNA, 20 bp, Artificial Sequence
  Description of Artificial Sequence: Synthetic primer
ttgtctctgcgacccatcaa

SEQ ID NO: 5780 - DNA, 19 bp, Artificial Sequence
  Description of Artificial Sequence: Synthetic primer
tgtgccgaacgtgtaccaa

SEQ ID NO: 5781 - DNA, 45 bp, Artificial Sequence
  Description of Artificial Sequence: Synthetic primer
  Description of Combined DNA/RNA Molecule: Synthetic primer
tgtgccgaacgtgtaccaaggcatctgtggtggtgggaatggtga

SEQ ID NO: 5782 - DNA, 41 bp, Artificial Sequence
  Description of Artificial Sequence: Synthetic primer
  Description of Combined DNA/RNA Molecule: Synthetic primer
acgacgacgacgaagccactctgcacacacacaccaggtgt

SEQ ID NO: 5783 - DNA, 39 bp, Artificial Sequence
  Description of Artificial Sequence: Synthetic primer
  Description of Combined DNA/RNA Molecule: Synthetic primer
acgacgacgacgaagcacacacacaccaggtgccccagt

SEQ ID NO: 5784 - DNA, 51 bp, Artificial Sequence
  Description of Artificial Sequence: Synthetic primer
  Description of Combined DNA/RNA Molecule: Synthetic primer
acgacgacgacttgacgaacataatgcaggacagctactggcctgagggct

SEQ ID NO: 5785 - DNA, 50 bp, Artificial Sequence
  Description of Artificial Sequence: Synthetic oligonucleotide
  Description of Combined DNA/RNA Molecule: Synthetic oligonucleotide
tggataaactaagtccgcccacccagcctaaggccattgaccccaggtct

SEQ ID NO: 5786 - DNA, 51 bp, Artificial Sequence
  Description of Artificial Sequence: Synthetic oligonucleotide
ggttctccccagcacagtcaaatccacaccgtgactgagcgacgtctaaca

SEQ ID NO: 5787 - DNA, 24 bp, Artificial Sequence
  Description of Artificial Sequence: Synthetic probe
aagaccccaggttctccccagcac

SEQ ID NO: 5788 - DNA, 22 bp, Artificial Sequence
  Description of Artificial Sequence: Synthetic primer
tggataaactaagtccgcccac

SEQ ID NO: 5789 - DNA, 21 bp, Artificial Sequence
  Description of Artificial Sequence: Synthetic primer
tgttagacgtcgctcagtcac

SEQ ID NO: 5790 - DNA, 48 bp, Artificial Sequence
  Description of Artificial Sequence: Synthetic primer
  Description of Combined DNA/RNA Molecule: Synthetic primer
tgttagacgtcgctcagtcacctgagggccctggtgtggatctgacta

SEQ ID NO: 5791 - DNA, 41 bp, Artificial Sequence
  Description of Artificial Sequence: Synthetic primer
  Description of Combined DNA/RNA Molecule: Synthetic primer
acgacgacgacgaaaaggaggtccaggtgaggagcagcact

SEQ ID NO: 5792 - DNA, 39 bp, Artificial Sequence
  Description of Artificial Sequence: Synthetic primer
  Description of Combined DNA/RNA Molecule: Synthetic primer
acgacgacgacgaaggccaaggaggtccaggtgaggagt

SEQ ID NO: 5793 - DNA, 53 bp, Artificial Sequence
  Description of Artificial Sequence: Synthetic primer
  Description of Combined DNA/RNA Molecule: Synthetic primer
acgacgacgacttgacgaacataatgaggaaggtgctgtctgggatgcugggc

SEQ ID NO: 5794 - DNA, 50 bp, Artificial Sequence
  Description of Artificial Sequence: Synthetic oligonucleotide
  Description of Combined DNA/RNA Molecule: Synthetic oligonucleotide
tcctgaattggccacaccacgcaccctgaacttcccatcttgccactgtg

SEQ ID NO: 5795 - DNA, 44 bp, Artificial Sequence
  Description of Artificial Sequence: Synthetic oligonucleotide
ctgcaggccccacagacagacccgtgactgagcgacgtctaaca

SEQ ID NO: 5796 - DNA, 22 bp, Artificial Sequence
  Description of Artificial Sequence: Synthetic probe
cccttgccactgcaggccccac

SEQ ID NO: 5797 - DNA, 20 bp, Artificial Sequence
  Description of Artificial Sequence: Synthetic primer
tcctgaattggccacaccac

SEQ ID NO: 5798 - DNA, 21 bp, Artificial Sequence
  Description of Artificial Sequence: Synthetic primer
tgttagacgtcgctcagtcac

SEQ ID NO: 5799 - DNA, 47 bp, Artificial Sequence
  Description of Artificial Sequence: Synthetic primer
  Description of Combined DNA/RNA Molecule: Synthetic primer
tgttagacgtcgctcagtcacgtgctgtctgggatgctggatgtcta

SEQ ID NO: 5800 - DNA, 52 bp, Artificial Sequence
  Description of Artificial Sequence: Synthetic primer
  Description of Combined DNA/RNA Molecule: Synthetic primer
acgacgacgacgaaatgattcaaatcttgaggtttcaaactgaaccauctta

SEQ ID NO: 5801 - DNA, 53 bp, Artificial Sequence
  Description of Artificial Sequence: Synthetic primer
  Description of Combined DNA/RNA Molecule: Synthetic primer
acgacgacgacttgacgaacataatgaggtgctgtgtgaaagagtgcagtccc

SEQ ID NO: 5802 - DNA, 46 bp, Artificial Sequence
  Description of Artificial Sequence: Synthetic oligonucleotide
  Description of Combined DNA/RNA Molecule: Synthetic oligonucleotide
ttcttgcggttctggaacactcttgtgccttttgcccaacaggcgc

SEQ ID NO: 5803 - DNA, 48 bp, Artificial Sequence
  Description of Artificial Sequence: Synthetic oligonucleotide
ggcatttctgcagggaccacaggtcacgtgatgctccgttgttgctaa

SEQ ID NO: 5804 - DNA, 27 bp, Artificial Sequence
  Description of Artificial Sequence: Synthetic probe
aacccaacaggcatttctgcagggacc

SEQ ID NO: 5805 - DNA, 20 bp, Artificial Sequence
  Description of Artificial Sequence: Synthetic primer
ttcttgcggttctggaacac

SEQ ID NO: 5806 - DNA, 21 bp, Artificial Sequence
  Description of Artificial Sequence: Synthetic primer
ttagcaacaacggagcatcac

SEQ ID NO: 5807 - DNA, 60 bp, Artificial Sequence
  Description of Artificial Sequence: Synthetic primer
  Description of Combined DNA/RNA Molecule: Synthetic primer
ttagcaacaacggagcatcacctgtttatgaaggtaaaaattcagaaggtgacttgtggc

SEQ ID NO: 5808 - DNA, 54 bp, Artificial Sequence
  Description of Artificial Sequence: Synthetic primer
  Description of Combined DNA/RNA Molecule: Synthetic primer
acgacgacgacgaatacatttcagagaccaaattcaaaatgaaaaaccaggcta

SEQ ID NO: 5809 - DNA, 51 bp, Artificial Sequence
  Description of Artificial Sequence: Synthetic primer
  Description of Combined DNA/RNA Molecule: Synthetic primer
acgacgacgacgaagagaccaaattcaaaatgaaaaaccaggctgcugtct

SEQ ID NO: 5810 - DNA, 52 bp, Artificial Sequence
  Description of Artificial Sequence: Synthetic primer
  Description of Combined DNA/RNA Molecule: Synthetic primer
acgacgacgacttgacgaacataatggctgatggatccctggtgtcagtgcc

SEQ ID NO: 5811 - DNA, 44 bp, Artificial Sequence
  Description of Artificial Sequence: Synthetic oligonucleotide
  Description of Combined DNA/RNA Molecule: Synthetic oligonucleotide
tcctcgagccgatgacacaccacacagagcctctggacaccatc

SEQ ID NO: 5812 - DNA, 45 bp, Artificial Sequence
  Description of Artificial Sequence: Synthetic oligonucleotide
ccactgtcagccagtgcagagcaagctgtaacgtccgtgggctaa

SEQ ID NO: 5813 - DNA, 26 bp, Artificial Sequence
  Description of Artificial Sequence: Synthetic probe
aactggacaccactgtcagccagtgc

SEQ ID NO: 5814 - DNA, 19 bp, Artificial Sequence
  Description of Artificial Sequence: Synthetic primer
tcctcgagccgatgacaca

SEQ ID NO: 5815 - DNA, 19 bp, Artificial Sequence
  Description of Artificial Sequence: Synthetic primer
ttagcccacggacgttaca

SEQ ID NO: 5816 - DNA, 47 bp, Artificial Sequence
  Description of Artificial Sequence: Synthetic primer
  Description of Combined DNA/RNA Molecule: Synthetic primer
ttagcccacggacgttacagctgatggatccctggtgtcaatgctta

SEQ ID NO: 5817 - DNA, 39 bp, Artificial Sequence
  Description of Artificial Sequence: Synthetic primer
  Description of Combined DNA/RNA Molecule: Synthetic primer
acgacgacgacgaacccctgcaagagcagagccaggtga

SEQ ID NO: 5818 - DNA, 40 bp, Artificial Sequence
  Description of Artificial Sequence: Synthetic primer
  Description of Combined DNA/RNA Molecule: Synthetic primer
acgacgacgacgaacctgtagcccctgcaagagcagagct

SEQ ID NO: 5819 - DNA, 54 bp, Artificial Sequence
  Description of Artificial Sequence: Synthetic primer
  Description of Combined DNA/RNA Molecule: Synthetic primer
acgacgacgacttgacgaacataatgcccaaaggagatgggcttcctgaugcct

SEQ ID NO: 5820 - DNA, 47 bp, Artificial Sequence
  Description of Artificial Sequence: Synthetic oligonucleotide
  Description of Combined DNA/RNA Molecule: Synthetic oligonucleotide
tcgcaacgtgccgaatacagcactgcacagaaggtcaccgcaggaaa

SEQ ID NO: 5821 - DNA, 42 bp, Artificial Sequence
  Description of Artificial Sequence: Synthetic oligonucleotide
ggaggccaaatccccagggagggtgttgcacggtcgagctaa

SEQ ID NO: 5822 - DNA, 23 bp, Artificial Sequence
  Description of Artificial Sequence: Synthetic probe
aacaccgcaggaggccaaatccc

SEQ ID NO: 5823 - DNA, 19 bp, Artificial Sequence
  Description of Artificial Sequence: Synthetic primer
tcgcaacgtgccgaataca

SEQ ID NO: 5824 - DNA, 19 bp, Artificial Sequence
  Description of Artificial Sequence: Synthetic primer
ttagctcgaccgtgcaaca

SEQ ID NO: 5825 - DNA, 48 bp, Artificial Sequence
  Description of Artificial Sequence: Synthetic primer
  Description of Combined DNA/RNA Molecule: Synthetic primer
ttagctcgaccgtgcaacacccaaaggagatgggcttcctggtgcccg

SEQ ID NO: 5826 - DNA, 41 bp, Artificial Sequence
  Description of Artificial Sequence: Synthetic primer
  Description of Combined DNA/RNA Molecule: Synthetic primer
acgacgacgacgaacatcccaaaggcagatgaggcagggct

SEQ ID NO: 5827 - DNA, 40 bp, Artificial Sequence
  Description of Artificial Sequence: Synthetic primer
  Description of Combined DNA/RNA Molecule: Synthetic primer
acgacgacgacgaacagcagcatcccaaaggcagauggga

SEQ ID NO: 5828 - DNA, 51 bp, Artificial Sequence
  Description of Artificial Sequence: Synthetic primer
  Description of Combined DNA/RNA Molecule: Synthetic primer
acgacgacgacttgacgaacataatgcttgggtctgtctgtgaggcctgcg

SEQ ID NO: 5829 - DNA, 47 bp, Artificial Sequence
  Description of Artificial Sequence: Synthetic oligonucleotide
  Description of Combined DNA/RNA Molecule: Synthetic oligonucleotide
taacgggattgagagtggacaaggaggtccaggtgaggaacagcatt

SEQ ID NO: 5830 - DNA, 50 bp, Artificial Sequence
  Description of Artificial Sequence: Synthetic oligonucleotide
gcaccctgaacttcccatcttgtcactgcagtgtctgccgcccttactaa

SEQ ID NO: 5831 - DNA, 31 bp, Artificial Sequence
  Description of Artificial Sequence: Synthetic probe
aaaggaacagcaccctgaacttcccatcttg

SEQ ID NO: 5832 - DNA, 21 bp, Artificial Sequence
  Description of Artificial Sequence: Synthetic primer
taacgggattgagagtggaca

SEQ ID NO: 5833 - DNA, 19 bp, Artificial Sequence
  Description of Artificial Sequence: Synthetic primer
ttagtaagggcggcagaca

SEQ ID NO: 5834 - DNA, 44 bp, Artificial Sequence
  Description of Artificial Sequence: Synthetic primer
  Description of Combined DNA/RNA Molecule: Synthetic primer
ttagtaagggcggcagacactgtctgtgaggcctgcaatgacag

SEQ ID NO: 5835 - DNA, 44 bp, Artificial Sequence; identical to SEQ ID NO: 874
  Description of Artificial Sequence: Synthetic primer
  Description of Combined DNA/RNA Molecule: Synthetic primer

SEQ ID NO: 5836 - DNA, 60 bp, Artificial Sequence; identical to SEQ ID NO: 875
  Description of Artificial Sequence: Synthetic primer
  Description of Combined DNA/RNA Molecule: Synthetic primer

SEQ ID NO: 5837 - DNA, 54 bp, Artificial Sequence; identical to SEQ ID NO: 876
  Description of Artificial Sequence: Synthetic oligonucleotide
  Description of Combined DNA/RNA Molecule: Synthetic oligonucleotide

SEQ ID NO: 5838 - DNA, 52 bp, Artificial Sequence; identical to SEQ ID NO: 877
  Description of Artificial Sequence: Synthetic oligonucleotide

SEQ ID NO: 5839 - DNA, 31 bp, Artificial Sequence; identical to SEQ ID NO: 878
  Description of Artificial Sequence: Synthetic probe

SEQ ID NO: 5840 - DNA, 22 bp, Artificial Sequence
  Description of Artificial Sequence: Synthetic primer
tccaaacaagctgatccgtaca

SEQ ID NO: 5841 - DNA, 19 bp, Artificial Sequence
  Description of Artificial Sequence: Synthetic primer
tagtaaccgctccgacaca

SEQ ID NO: 5842 - DNA, 37 bp, Artificial Sequence; identical to SEQ ID NO: 1647
  Description of Artificial Sequence: Synthetic primer
  Description of Combined DNA/RNA Molecule: Synthetic primer

SEQ ID NO: 5843 - DNA, 42 bp, Artificial Sequence; identical to SEQ ID NO: 1648
  Description of Artificial Sequence: Synthetic primer
  Description of Combined DNA/RNA Molecule: Synthetic primer

SEQ ID NO: 5844 - DNA, 48 bp, Artificial Sequence; identical to SEQ ID NO: 1649
  Description of Artificial Sequence: Synthetic primer
  Description of Combined DNA/RNA Molecule: Synthetic primer

SEQ ID NO: 5845 - DNA, 48 bp, Artificial Sequence; identical to SEQ ID NO: 1650
  Description of Artificial Sequence: Synthetic oligonucleotide
  Description of Combined DNA/RNA Molecule: Synthetic oligonucleotide

SEQ ID NO: 5846 - DNA, 57 bp, Artificial Sequence; identical to SEQ ID NO: 1651
  Description of Artificial Sequence: Synthetic oligonucleotide

SEQ ID NO: 5847 - DNA, 36 bp, Artificial Sequence; identical to SEQ ID NO: 1652
  Description of Artificial Sequence: Synthetic probe

SEQ ID NO: 5848 - DNA, 20 bp, Artificial Sequence
  Description of Artificial Sequence: Synthetic primer
tccgggtatacactgtccca

SEQ ID NO: 5849 - DNA, 21 bp, Artificial Sequence
  Description of Artificial Sequence: Synthetic primer
tggcctgtcctctgttaacca

SEQ ID NO: 5850 - DNA, 46 bp, Artificial Sequence; identical to SEQ ID NO: 1655
  Description of Artificial Sequence: Synthetic primer
  Description of Combined DNA/RNA Molecule: Synthetic primer

SEQ ID NO: 5851 - DNA, 35 bp, Artificial Sequence
  Description of Artificial Sequence: Synthetic primer
  Description of Combined DNA/RNA Molecule: Synthetic primer
acgacgacgacgaagcccagccccaggccaaacta

SEQ ID NO: 5852 - DNA, 40 bp, Artificial Sequence
  Description of Artificial Sequence: Synthetic primer
  Description of Combined DNA/RNA Molecule: Synthetic primer
acgacgacgacgaaagccccaggccaaactggaaaactcc

SEQ ID NO: 5853 - DNA, 48 bp, Artificial Sequence
  Description of Artificial Sequence: Synthetic primer
  Description of Combined DNA/RNA Molecule: Synthetic primer
acgacgacgacttgacgaacataatgccctccccatgcagcacaggac

SEQ ID NO: 5854 - DNA, 59 bp, Artificial Sequence
  Description of Artificial Sequence: Synthetic oligonucleotide
  Description of Combined DNA/RNA Molecule: Synthetic oligonucleotide
ttggtacgaggagggcacataactttgggctttatttaaaacactcaggttccaaaaat

SEQ ID NO: 5855 - DNA, 42 bp, Artificial Sequence
  Description of Artificial Sequence: Synthetic oligonucleotide
aaagccaggtcccctccacaggctgtctgccgcccttactaa

SEQ ID NO: 5856 - DNA, 24 bp, Artificial Sequence
  Description of Artificial Sequence: Synthetic probe
ttggttccaaaagccaggtcccct

SEQ ID NO: 5857 - DNA, 19 bp, Artificial Sequence
  Description of Artificial Sequence: Synthetic primer
ttggtacgaggagggcaca

SEQ ID NO: 5858 - DNA, 19 bp, Artificial Sequence
  Description of Artificial Sequence: Synthetic primer
ttagtaagggcggcagaca

SEQ ID NO: 5859 - DNA, 43 bp, Artificial Sequence
  Description of Artificial Sequence: Synthetic primer
  Description of Combined DNA/RNA Molecule: Synthetic primer
ttagtaagggcggcagacactgaggcctcctggcctatggaga

SEQ ID NO: 5860 - DNA, 49 bp, Artificial Sequence
  Description of Artificial Sequence: Synthetic primer
  Description of Combined DNA/RNA Molecule: Synthetic primer
acgacgacgacgaacaaaaccccaagcttttacaacataaagcacatga

SEQ ID NO: 5861 - DNA, 49 bp, Artificial Sequence
  Description of Artificial Sequence: Synthetic primer
  Description of Combined DNA/RNA Molecule: Synthetic primer
acgacgacgacgaaaccccaagcttttacaacataaagcacatggtgta

SEQ ID NO: 5862 - DNA, 53 bp, Artificial Sequence
  Description of Artificial Sequence: Synthetic primer
  Description of Combined DNA/RNA Molecule: Synthetic primer
acgacgacgacttgacgaacataatggaagtggaggagggtgagcagaggcta

SEQ ID NO: 5863 - DNA, 49 bp, Artificial Sequence
  Description of Artificial Sequence: Synthetic oligonucleotide
  Description of Combined DNA/RNA Molecule: Synthetic oligonucleotide
tcagacgcactaaacaggcaatgtggccacagcaagtaatgacactcca

SEQ ID NO: 5864 - DNA, 42 bp, Artificial Sequence
  Description of Artificial Sequence: Synthetic oligonucleotide
ctctgggagccctgcccaggcagttgcggatcgtcgtgtgaa

SEQ ID NO: 5865 - DNA, 25 bp, Artificial Sequence
  Description of Artificial Sequence: Synthetic probe
aaaatgacactctgggagccctgcc

SEQ ID NO: 5866 - DNA, 21 bp, Artificial Sequence
  Description of Artificial Sequence: Synthetic primer
tcagacgcactaaacaggcaa

SEQ ID NO: 5867 - DNA, 19 bp, Artificial Sequence
  Description of Artificial Sequence: Synthetic primer
ttcacacgacgatccgcaa

SEQ ID NO: 5868 - DNA, 44 bp, Artificial Sequence
  Description of Artificial Sequence: Synthetic primer
  Description of Combined DNA/RNA Molecule: Synthetic primer
ttcacacgacgatccgcaagaggagggtgagcagaggttgccta

SEQ ID NO: 5869 - DNA, 40 bp, Artificial Sequence
  Description of Artificial Sequence: Synthetic primer
  Description of Combined DNA/RNA Molecule: Synthetic primer
acgacgacgacgaaggacacacacccaggagcacactgga

SEQ ID NO: 5870 - DNA, 40 bp, Artificial Sequence
  Description of Artificial Sequence: Synthetic primer
  Description of Combined DNA/RNA Molecule: Synthetic primer
acgacgacgacgaacagcaggacacacacccaggagcacg

SEQ ID NO: 5871 - DNA, 60 bp, Artificial Sequence
  Description of Artificial Sequence: Synthetic primer
  Description of Combined DNA/RNA Molecule: Synthetic primer
acgacgacgacttgacgaacataatgggttttccaattaacacctctgtgatctcuaatc

SEQ ID NO: 5872 - DNA, 46 bp, Artificial Sequence
  Description of Artificial Sequence: Synthetic oligonucleotide
  Description of Combined DNA/RNA Molecule: Synthetic oligonucleotide
tctcaatgtcgagccgtacccacccctctctccctccctcacagac

SEQ ID NO: 5873 - DNA, 55 bp, Artificial Sequence
  Description of Artificial Sequence: Synthetic oligonucleotide
caggtaaactccaggcatccatcagtctgttaattgggttcttcggctggctcaa

SEQ ID NO: 5874 - DNA, 29 bp, Artificial Sequence
  Description of Artificial Sequence: Synthetic probe
tttccctcacaggtaaactccaggcatcc

SEQ ID NO: 5875 - DNA, 20 bp, Artificial Sequence
  Description of Artificial Sequence: Synthetic primer
tctcaatgtcgagccgtacc

SEQ ID NO: 5876 - DNA, 19 bp, Artificial Sequence
  Description of Artificial Sequence: Synthetic primer
ttgagccagccgaagaacc

SEQ ID NO: 5877 - DNA, 35 bp, Artificial Sequence
  Description of Artificial Sequence: Synthetic primer
  Description of Combined DNA/RNA Molecule: Synthetic primer
acgacgacgacgaagagggccatgagggcaggaat

SEQ ID NO: 5878 - DNA, 44 bp, Artificial Sequence
  Description of Artificial Sequence: Synthetic primer
  Description of Combined DNA/RNA Molecule: Synthetic primer
acgacgacgacgaattgtctccatttagccaccaggtgcuggac

SEQ ID NO: 5879 - DNA, 58 bp, Artificial Sequence
  Description of Artificial Sequence: Synthetic primer
  Description of Combined DNA/RNA Molecule: Synthetic primer
acgacgacgacttgacgaacataattgctttgcacagagttgcttttgtgtgcuggaa

SEQ ID NO: 5880 - DNA, 42 bp, Artificial Sequence
  Description of Artificial Sequence: Synthetic oligonucleotide
  Description of Combined DNA/RNA Molecule: Synthetic oligonucleotide
tttcgctcgacgcataccagggccacagctccagacagtaat

SEQ ID NO: 5881 - DNA, 57 bp, Artificial Sequence
  Description of Artificial Sequence: Synthetic oligonucleotide
gtagcacaataacacactcactcaaaactccaagctcctggcgcggctactgtaaaa

SEQ ID NO: 5882 - DNA, 36 bp, Artificial Sequence
  Description of Artificial Sequence: Synthetic probe
aaccagacagtagcacaataacacactcactcaaaa

SEQ ID NO: 5883 - DNA, 19 bp, Artificial Sequence
  Description of Artificial Sequence: Synthetic primer
tttcgctcgacgcatacca

SEQ ID NO: 5884 - DNA, 19 bp, Artificial Sequence
  Description of Artificial Sequence: Synthetic primer
ttttacagtagccgcgcca

SEQ ID NO: 5885 - DNA, 49 bp, Artificial Sequence
  Description of Artificial Sequence: Synthetic primer
  Description of Combined DNA/RNA Molecule: Synthetic primer
ttttacagtagccgcgccagagttgcttttgtgtgctggagcctggagc

SEQ ID NO: 5886 - DNA, 38 bp, Artificial Sequence
  Description of Artificial Sequence: Synthetic primer
  Description of Combined DNA/RNA Molecule: Synthetic primer
acgacgacgacgaactcttgcagcccacccccaagcat

SEQ ID NO: 5887 - DNA, 40 bp, Artificial Sequence
  Description of Artificial Sequence: Synthetic primer
  Description of Combined DNA/RNA Molecule: Synthetic primer
acgacgacgacgaatccacactcttgcagcccacccccag

SEQ ID NO: 5888 - DNA, 52 bp, Artificial Sequence
  Description of Artificial Sequence: Synthetic primer
  Description of Combined DNA/RNA Molecule: Synthetic primer
acgacgacgacttgacgaacataatcctgtgtgtgtgtgtggtgggautgaa

SEQ ID NO: 5889 - DNA, 51 bp, Artificial Sequence
  Description of Artificial Sequence: Synthetic oligonucleotide
  Description of Combined DNA/RNA Molecule: Synthetic oligonucleotide
tctcataccagacgcggtaacgcaccaagcctcacatccatacgcacagtg

SEQ ID NO: 5890 - DNA, 48 bp, Artificial Sequence
  Description of Artificial Sequence: Synthetic oligonucleotide
cagcactcacagaagtcctcaaggcacccgttcgtgtcgctgtgctta

SEQ ID NO: 5891 - DNA, 32 bp, Artificial Sequence
  Description of Artificial Sequence: Synthetic probe
ttatacgcacagcactcacagaagtcctcaag

SEQ ID NO: 5892 - DNA, 21 bp, Artificial Sequence
  Description of Artificial Sequence: Synthetic primer
tctcataccagacgcggtaac

SEQ ID NO: 5893 - DNA, 19 bp, Artificial Sequence
  Description of Artificial Sequence: Synthetic primer
taagcacagcgacacgaac

SEQ ID NO: 5894 - DNA, 47 bp, Artificial Sequence
  Description of Artificial Sequence: Synthetic primer
  Description of Combined DNA/RNA Molecule: Synthetic primer
taagcacagcgacacgaacgtgtgtggtgggattgagaggatgcctc

SEQ ID NO: 5895 - DNA, 40 bp, Artificial Sequence
  Description of Artificial Sequence: Synthetic primer
  Description of Combined DNA/RNA Molecule: Synthetic primer
acgacgacgacgaaccactgcccacatcccttccacccta

SEQ ID NO: 5896 - DNA, 41 bp, Artificial Sequence
  Description of Artificial Sequence: Synthetic primer
  Description of Combined DNA/RNA Molecule: Synthetic primer
acgacgacgacgaacactgcccacatcccttccaccctgga

SEQ ID NO: 5897 - DNA, 55 bp, Artificial Sequence
  Description of Artificial Sequence: Synthetic primer
  Description of Combined DNA/RNA Molecule: Synthetic primer
acgacgacgacttgacgaacataatggccactgaaacccagctctgtaaagaagg

SEQ ID NO: 5898 - DNA, 44 bp, Artificial Sequence
  Description of Artificial Sequence: Synthetic oligonucleotide
  Description of Combined DNA/RNA Molecule: Synthetic oligonucleotide
ttttcggcggcagctaaacgggcctctgcacagtctacagttcc

SEQ ID NO: 5899 - skipped

SEQ ID NO: 5900 - DNA, 35 bp, Artificial Sequence
  Description of Artificial Sequence: Synthetic probe
ttgtctacagttttctgtgcacacttggtcttcag

SEQ ID NO: 5901 - DNA, 19 bp, Artificial Sequence
  Description of Artificial Sequence: Synthetic primer
ttttcggcggcagctaaac

SEQ ID NO: 5902 - DNA, 19 bp, Artificial Sequence
  Description of Artificial Sequence: Synthetic primer
taagcacagcgacacgaac

SEQ ID NO: 5903 - DNA, 54 bp, Artificial Sequence
  Description of Artificial Sequence: Synthetic primer
  Description of Combined DNA/RNA Molecule: Synthetic primer
taagcacagcgacacgaaccccagctctgtaaagaagaaaaacccaggtgtaac

SEQ ID NO: 5904 - DNA, 38 bp, Artificial Sequence
  Description of Artificial Sequence: Synthetic primer
  Description of Combined DNA/RNA Molecule: Synthetic primer
acgacgacgacgaagggcagcaaacactgggcagctcg

SEQ ID NO: 5905 - DNA, 40 bp, Artificial Sequence
  Description of Artificial Sequence: Synthetic primer
  Description of Combined DNA/RNA Molecule: Synthetic primer
acgacgacgacgaagcagcaaacactgggcagctcagatc

SEQ ID NO: 5906 - DNA, 65 bp, Artificial Sequence
  Description of Artificial Sequence: Synthetic primer
  Description of Combined DNA/RNA Molecule: Synthetic primer
acgacgacgacttgacgaacataatgaaaaacatgattaatcaaaggtttgaactgttgcugtgc

SEQ ID NO: 5907 - DNA, 42 bp, Artificial Sequence
  Description of Artificial Sequence: Synthetic oligonucleotide
  Description of Combined DNA/RNA Molecule: Synthetic oligonucleotide
tccggaccttcatcctccacagcctccacagggctcagccga

SEQ ID NO: 5908 - DNA, 51 bp, Artificial Sequence
  Description of Artificial Sequence: Synthetic oligonucleotide
gccagacaagatttactgggcctcaaacacatgggcaggaacacgatagta

SEQ ID NO: 5909 - DNA, 29 bp, Artificial Sequence
  Description of Artificial Sequence: Synthetic probe
ttgggctcagccagacaagatttactggg

SEQ ID NO: 5910 - DNA, 19 bp, Artificial Sequence
  Description of Artificial Sequence: Synthetic primer
tccggaccttcatcctcca

SEQ ID NO: 5911 - DNA, 20 bp, Artificial Sequence
  Description of Artificial Sequence: Synthetic primer
tactatcgtgttcctgccca

SEQ ID NO: 5912 - DNA, 58 bp, Artificial Sequence
  Description of Artificial Sequence: Synthetic primer
  Description of Combined DNA/RNA Molecule: Synthetic primer
tactatcgtgttcctgcccagattaatcaaaggtttgaactgttgctgtgtctgaggt

SEQ ID NO: 5913 - DNA, 50 bp, Artificial Sequence
  Description of Artificial Sequence: Synthetic primer
  Description of Combined DNA/RNA Molecule: Synthetic primer
acgacgacgacgaacaactaacagtcagaaatctcaggactgacacctct

SEQ ID NO: 5914 - DNA, 52 bp, Artificial Sequence
  Description of Artificial Sequence: Synthetic primer
  Description of Combined DNA/RNA Molecule: Synthetic primer
acgacgacgacgaacaactaacagtcagaaatctcaggactgacaccuccaa

SEQ ID NO: 5915 - DNA, 57 bp, Artificial Sequence
  Description of Artificial Sequence: Synthetic primer
  Description of Combined DNA/RNA Molecule: Synthetic primer
acgacgacgacttgacgaacataatcatctgaagtgagtgctagcttgctgagaaac

SEQ ID NO: 5916 - DNA, 51 bp, Artificial Sequence
  Description of Artificial Sequence: Synthetic oligonucleotide
  Description of Combined DNA/RNA Molecule: Synthetic oligonucleotide
ttagccgccaaacgtaccacagtgtcacaatctcacaattgggacaggaaa

SEQ ID NO: 5917 - DNA, 54 bp, Artificial Sequence
  Description of Artificial Sequence: Synthetic oligonucleotide
ggaggctacagagtcaggagagagaaaccaaaagtgggcaggaacacgatagta

SEQ ID NO: 5918 - DNA, 29 bp, Artificial Sequence
  Description of Artificial Sequence: Synthetic probe
cctgggacaggaggctacagagtcaggag

SEQ ID NO: 5919 - DNA, 19 bp, Artificial Sequence
  Description of Artificial Sequence: Synthetic primer
ttagccgccaaacgtacca

SEQ ID NO: 5920 - DNA, 20 bp, Artificial Sequence
  Description of Artificial Sequence: Synthetic primer
tactatcgtgttcctgccca

SEQ ID NO: 5921 - DNA, 57 bp, Artificial Sequence
  Description of Artificial Sequence: Synthetic primer
  Description of Combined DNA/RNA Molecule: Synthetic primer
tactatcgtgttcctgcccaaaaagatttctcagcaagctagcactcactccggttc

SEQ ID NO: 5922 - DNA, 48 bp, Artificial Sequence
  Description of Artificial Sequence: Synthetic primer
  Description of Combined DNA/RNA Molecule: Synthetic primer
acgacgacgacgaagaaacagagtcatcaacccaagaaggtcauggag

SEQ ID NO: 5923 - DNA, 45 bp, Artificial Sequence
  Description of Artificial Sequence: Synthetic primer
  Description of Combined DNA/RNA Molecule: Synthetic primer
acgacgacgacgaagtcatcaacccaagaaggtcatgggagatgg

SEQ ID NO: 5924 - DNA, 48 bp, Artificial Sequence
  Description of Artificial Sequence: Synthetic primer
  Description of Combined DNA/RNA Molecule: Synthetic primer
acgacgacgacttgacgaacataatggagctggctgccctgcaugcaa

SEQ ID NO: 5925 - DNA, 46 bp, Artificial Sequence
  Description of Artificial Sequence: Synthetic oligonucleotide
  Description of Combined DNA/RNA Molecule: Synthetic oligonucleotide
ttgcaaaccacccggacaaccagggtaaacagcaggtctcaccatc

SEQ ID NO: 5926 - DNA, 49 bp, Artificial Sequence
  Description of Artificial Sequence: Synthetic oligonucleotide
ccactatgtcaccctttcctgccacctccttggtcagcatcgactccta

SEQ ID NO: 5927 - DNA, 31 bp, Artificial Sequence
  Description of Artificial Sequence: Synthetic probe
ttggtctcaccactatgtcaccctttcctgc

SEQ ID NO: 5928 - DNA, 19 bp, Artificial Sequence
  Description of Artificial Sequence: Synthetic primer
ttgcaaaccacccggacaa

SEQ ID NO: 5929 - DNA, 20 bp, Artificial Sequence
  Description of Artificial Sequence: Synthetic primer
taggagtcgatgctgaccaa

SEQ ID NO: 5930 - DNA, 48 bp, Artificial Sequence
  Description of Artificial Sequence: Synthetic primer
  Description of Combined DNA/RNA Molecule: Synthetic primer
taggagtcgatgctgaccaagcatgcagttcatctgaggagatggcaa

SEQ ID NO: 5931 - DNA, 55 bp, Artificial Sequence
  Description of Artificial Sequence: Synthetic primer
  Description of Combined DNA/RNA Molecule: Synthetic primer
acgacgacgacgaaaaaatgttacactttaatcaaccactacttcttccauggaa

SEQ ID NO: 5932 - DNA, 52 bp, Artificial Sequence
  Description of Artificial Sequence: Synthetic primer
  Description of Combined DNA/RNA Molecule: Synthetic primer
acgacgacgacgaacactttaatcaaccactacttcttccatggagagggat

SEQ ID NO: 5933 - DNA, 65 bp, Artificial Sequence
  Description of Artificial Sequence: Synthetic primer
  Description of Combined DNA/RNA Molecule: Synthetic primer
acgacgacgacttgacgaacataataattgttttaaggtgaaacttggacatggaaaaaagatgt

SEQ ID NO: 5934 - DNA, 43 bp, Artificial Sequence
  Description of Artificial Sequence: Synthetic oligonucleotide
  Description of Combined DNA/RNA Molecule: Synthetic oligonucleotide
ttgcaaaccacccggacaacagtgggtgagggtgtacacattc

SEQ ID NO: 5935 - DNA, 51 bp, Artificial Sequence
  Description of Artificial Sequence: Synthetic oligonucleotide
catctcatcacagcctgtgagtggaacaggcttggtcagcatcgactccta

SEQ ID NO: 5936 - DNA, 33 bp, Artificial Sequence
  Description of Artificial Sequence: Synthetic probe
ttgtgtacacatctcatcacagcctgtgagtgg

SEQ ID NO: 5937 - DNA, 19 bp, Artificial Sequence
  Description of Artificial Sequence: Synthetic primer
ttgcaaaccacccggacaa

SEQ ID NO: 5938 - DNA, 20 bp, Artificial Sequence
  Description of Artificial Sequence: Synthetic primer
taggagtcgatgctgaccaa

SEQ ID NO: 5939 - DNA, 59 bp, Artificial Sequence
  Description of Artificial Sequence: Synthetic primer
  Description of Combined DNA/RNA Molecule: Synthetic primer
taggagtcgatgctgaccaagttttaaggtgaaacttggacatggaaaaaaggtgctga

SEQ ID NO: 5940 - DNA, 58 bp, Artificial Sequence
  Description of Artificial Sequence: Synthetic primer
  Description of Combined DNA/RNA Molecule: Synthetic primer
acgacgacgacgaactttttaactcaccagctccaagttaatttgttgattcacttag

SEQ ID NO: 5941 - DNA, 54 bp, Artificial Sequence
  Description of Artificial Sequence: Synthetic primer
  Description of Combined DNA/RNA Molecule: Synthetic primer
acgacgacgacgaactcaccagctccaagttaatttgttgattcacttaaccta

SEQ ID NO: 5942 - DNA, 66 bp, Artificial Sequence
  Description of Artificial Sequence: Synthetic primer
  Description of Combined DNA/RNA Molecule: Synthetic primer
acgacgacgacttgacgaacataatatagttggaaagtgtgtattgagtgcctattataccccaga

SEQ ID NO: 5943 - DNA, 44 bp, Artificial Sequence
  Description of Artificial Sequence: Synthetic oligonucleotide
  Description of Combined DNA/RNA Molecule: Synthetic oligonucleotide
tacatgccatcccacgacactggaaactccccagggacaggttc

SEQ ID NO: 5944 - DNA, 51 bp, Artificial Sequence
  Description of Artificial Sequence: Synthetic oligonucleotide
ggtcttgtgctactgaattcccttgcacacagtgtgtcggagcggttacta

SEQ ID NO: 5945 - DNA, 31 bp, Artificial Sequence
  Description of Artificial Sequence: Synthetic probe
ttagggacaggtcttgtgctactgaattccc

SEQ ID NO: 5946 - DNA, 19 bp, Artificial Sequence
  Description of Artificial Sequence: Synthetic primer
tacatgccatcccacgaca

SEQ ID NO: 5947 - DNA, 19 bp, Artificial Sequence
  Description of Artificial Sequence: Synthetic primer
tagtaaccgctccgacaca

SEQ ID NO: 5948 - DNA, 49 bp, Artificial Sequence
  Description of Artificial Sequence: Synthetic primer
  Description of Combined DNA/RNA Molecule: Synthetic primer
tagtaaccgctccgacacagtgcctattataccccaggctgtatgcaaa

SEQ ID NO: 5949 - DNA, 42 bp, Artificial Sequence
  Description of Artificial Sequence: Synthetic primer
  Description of Combined DNA/RNA Molecule: Synthetic primer
acgacgacgacgaagcaacacagggcaaatgaggacacttct

SEQ ID NO: 5950 - DNA, 44 bp, Artificial Sequence
  Description of Artificial Sequence: Synthetic primer
  Description of Combined DNA/RNA Molecule: Synthetic primer
acgacgacgacgaaaacacagggcaaatgaggacacttcctgaa

SEQ ID NO: 5951 - DNA, 50 bp, Artificial Sequence
  Description of Artificial Sequence: Synthetic primer
  Description of Combined DNA/RNA Molecule: Synthetic primer
acgacgacgacttgacgaacataatccaggcccagactgggttgagccaa

SEQ ID NO: 5952 - DNA, 52 bp, Artificial Sequence
  Description of Artificial Sequence: Synthetic oligonucleotide
  Description of Combined DNA/RNA Molecule: Synthetic oligonucleotide
tccaaacaagctgatccgtacagctgggaaccccactgaaattttcacagca

SEQ ID NO: 5953 - DNA, 50 bp, Artificial Sequence
  Description of Artificial Sequence: Synthetic oligonucleotide
cagtgcctgggaattcctagagcctgagcactgtgtcggagcggttacta

SEQ ID NO: 5954 - DNA, 33 bp, Artificial Sequence
  Description of Artificial Sequence: Synthetic probe
ttattttcacagtgcctgggaattcctagagcc

SEQ ID NO: 5955 - DNA, 22 bp, Artificial Sequence
  Description of Artificial Sequence: Synthetic primer
tccaaacaagctgatccgtaca

SEQ ID NO: 5956 - DNA, 19 bp, Artificial Sequence
  Description of Artificial Sequence: Synthetic primer
tagtaaccgctccgacaca

SEQ ID NO: 5957 - DNA, 45 bp, Artificial Sequence
  Description of Artificial Sequence: Synthetic primer
  Description of Combined DNA/RNA Molecule: Synthetic primer
tagtaaccgctccgacacaccagactgggttgagccagatgctcg

SEQ ID NO: 5958 - DNA, 39 bp, Artificial Sequence
  Description of Artificial Sequence: Synthetic primer
  Description of Combined DNA/RNA Molecule: Synthetic primer
acgacgacgacgaacaccccttgcccacaggtcagtaga

SEQ ID NO: 5959 - DNA, 41 bp, Artificial Sequence
  Description of Artificial Sequence: Synthetic primer
  Description of Combined DNA/RNA Molecule: Synthetic primer
acgacgacgacgaaccttgcccacaggtcagtaggccacat

SEQ ID NO: 5960 - DNA, 48 bp, Artificial Sequence
  Description of Artificial Sequence: Synthetic primer
  Description of Combined DNA/RNA Molecule: Synthetic primer
acgacgacgacttgacgaacataatgagggctgctggtggaccccctc

SEQ ID NO: 5961 - DNA, 46 bp, Artificial Sequence
  Description of Artificial Sequence: Synthetic oligonucleotide
  Description of Combined DNA/RNA Molecule: Synthetic oligonucleotide
tagggcgacagttaccacaaggctggcttgaggtacatacagggtc

SEQ ID NO: 5962 - DNA, 39 bp, Artificial Sequence
  Description of Artificial Sequence: Synthetic oligonucleotide
gggctggctgcaggtggagttgtgggtctcgctcgtata

SEQ ID NO: 5963 - DNA, 25 bp, Artificial Sequence
  Description of Artificial Sequence: Synthetic probe
aaacatacagggctggctgcaggtg

SEQ ID NO: 5964 - DNA, 20 bp, Artificial Sequence
  Description of Artificial Sequence: Synthetic primer
tagggcgacagttaccacaa

SEQ ID NO: 5965 - DNA, 20 bp, Artificial Sequence
  Description of Artificial Sequence: Synthetic primer
tatacgagcgagacccacaa

SEQ ID NO: 5966 - DNA, 44 bp, Artificial Sequence
  Description of Artificial Sequence: Synthetic primer
  Description of Combined DNA/RNA Molecule: Synthetic primer
tatacgagcgagacccacaagctgctggtggacccccctgcact

SEQ ID NO: 5967 - DNA, 40 bp, Artificial Sequence
  Description of Artificial Sequence: Synthetic primer
  Description of Combined DNA/RNA Molecule: Synthetic primer
acgacgacgacgaacacctgtccaggcatgtcccaggatc

SEQ ID NO: 5968 - DNA, 40 bp, Artificial Sequence
  Description of Artificial Sequence: Synthetic primer
  Description of Combined DNA/RNA Molecule: Synthetic primer
acgacgacgacgaactgtccaggcatgtcccaggauttga

SEQ ID NO: 5969 - DNA, 55 bp, Artificial Sequence
  Description of Artificial Sequence: Synthetic primer
  Description of Combined DNA/RNA Molecule: Synthetic primer
acgacgacgacttgacgaacataatagatgtcacctgaggaagttcacccctggt

SEQ ID NO: 5970 - DNA, 43 bp, Artificial Sequence
  Description of Artificial Sequence: Synthetic oligonucleotide
  Description of Combined DNA/RNA Molecule: Synthetic oligonucleotide
tccgactttagtgcgtcacaatgagggcagctgagacaacaca

SEQ ID NO: 5971 - DNA, 46 bp, Artificial Sequence
  Description of Artificial Sequence: Synthetic oligonucleotide
acatggaggagatggcaggttcagggttgtgggtctcgctcgtata

SEQ ID NO: 5972 - DNA, 27 bp, Artificial Sequence
  Description of Artificial Sequence: Synthetic probe
tttgagacaacatggaggagatggcag

SEQ ID NO: 5973 - DNA, 21 bp, Artificial Sequence
  Description of Artificial Sequence: Synthetic primer
tccgactttagtgcgtcacaa

SEQ ID NO: 5974 - DNA, 20 bp, Artificial Sequence
  Description of Artificial Sequence: Synthetic primer
tatacgagcgagacccacaa

SEQ ID NO: 5975 - DNA, 48 bp, Artificial Sequence
  Description of Artificial Sequence: Synthetic primer
  Description of Combined DNA/RNA Molecule: Synthetic primer
tatacgagcgagacccacaagtcacctgaggaagttcacccttgggac

SEQ ID NO: 5976 - DNA, 40 bp, Artificial Sequence
  Description of Artificial Sequence: Synthetic primer
  Description of Combined DNA/RNA Molecule: Synthetic primer
acgacgacgacgaagagcagttgtgcctccagccagctcg

SEQ ID NO: 5977 - DNA, 42 bp, Artificial Sequence
  Description of Artificial Sequence: Synthetic primer
  Description of Combined DNA/RNA Molecule: Synthetic primer
acgacgacgacgaactcagggtagcactccaggagcagttgc

SEQ ID NO: 5978 - DNA, 56 bp, Artificial Sequence
  Description of Artificial Sequence: Synthetic primer
  Description of Combined DNA/RNA Molecule: Synthetic primer
acgacgacgacttgacgaacataatgcagggtttatgtgcagaagagtggacttga

SEQ ID NO: 5979 - DNA, 43 bp, Artificial Sequence
  Description of Artificial Sequence: Synthetic oligonucleotide
  Description of Combined DNA/RNA Molecule: Synthetic oligonucleotide
tcaaacaaaggcgaccacaacgcacctgtggcaggtcacattg

SEQ ID NO: 5980 - DNA, 52 bp, Artificial Sequence
  Description of Artificial Sequence: Synthetic oligonucleotide
catcacccactcaggaccccagagaccaaggttgtcgcataggcagttcata

SEQ ID NO: 5981 - DNA, 27 bp, Artificial Sequence
  Description of Artificial Sequence: Synthetic probe
aacaggtcacatcacccactcaggacc

SEQ ID NO: 5982 - DNA, 21 bp, Artificial Sequence
  Description of Artificial Sequence: Synthetic primer
tcaaacaaaggcgaccacaac

SEQ ID NO: 5983 - DNA, 22 bp, Artificial Sequence
  Description of Artificial Sequence: Synthetic primer
tatgaactgcctatgcgacaac

SEQ ID NO: 5984 - DNA, 53 bp, Artificial Sequence
  Description of Artificial Sequence: Synthetic primer
  Description of Combined DNA/RNA Molecule: Synthetic primer
tatgaactgcctatgcgacaactgtgcagaagagtggacttggtctttgggac

SEQ ID NO: 5985 - DNA, 44 bp, Artificial Sequence
  Description of Artificial Sequence: Synthetic primer
  Description of Combined DNA/RNA Molecule: Synthetic primer
acgacgacgacgaactagtgctagcccaaggagcagacagggat

SEQ ID NO: 5986 - DNA, 40 bp, Artificial Sequence
  Description of Artificial Sequence: Synthetic primer
  Description of Combined DNA/RNA Molecule: Synthetic primer
acgacgacgacgaaggcctagtgctagcccaaggagcagg

SEQ ID NO: 5987 - DNA, 50 bp, Artificial Sequence
  Description of Artificial Sequence: Synthetic primer
  Description of Combined DNA/RNA Molecule: Synthetic primer
acgacgacgacttgacgaacataatctgaggctgctgtgctgggacagct

SEQ ID NO: 5988 - DNA, 44 bp, Artificial Sequence
  Description of Artificial Sequence: Synthetic oligonucleotide
  Description of Combined DNA/RNA Molecule: Synthetic oligonucleotide
taaacaatgagacccgctgaacagaggcagtgggcatcagccct

SEQ ID NO: 5989 - DNA, 50 bp, Artificial Sequence
  Description of Artificial Sequence: Synthetic oligonucleotide
gcctcatctcagtgctgctcagtcaggcgttgtcgcataggcagttcata

SEQ ID NO: 5990 - DNA, 27 bp, Artificial Sequence
  Description of Artificial Sequence: Synthetic probe
aaggcatcagcctcatctcagtgctgc

SEQ ID NO: 5991 - DNA, 22 bp, Artificial Sequence
  Description of Artificial Sequence: Synthetic primer
taaacaatgagacccgctgaac

SEQ ID NO: 5992 - DNA, 22 bp, Artificial Sequence
  Description of Artificial Sequence: Synthetic primer
tatgaactgcctatgcgacaac

SEQ ID NO: 5993 - DNA, 48 bp, Artificial Sequence
  Description of Artificial Sequence: Synthetic primer
  Description of Combined DNA/RNA Molecule: Synthetic primer
tatgaactgcctatgcgacaacctgtgctgggacagcctgattgagcg

SEQ ID NO: 5994 - DNA, 43 bp, Artificial Sequence
  Description of Artificial Sequence: Synthetic primer
  Description of Combined DNA/RNA Molecule: Synthetic primer
acgacgacgacgaagagctgcatttttgtccaagcccagttag

SEQ ID NO: 5995 - DNA, 46 bp, Artificial Sequence
  Description of Artificial Sequence: Synthetic primer
  Description of Combined DNA/RNA Molecule: Synthetic primer
acgacgacgacgaagctgcatttttgtccaagcccagttaaaaaat

SEQ ID NO: 5996 - DNA, 56 bp, Artificial Sequence
  Description of Artificial Sequence: Synthetic primer
  Description of Combined DNA/RNA Molecule: Synthetic primer
acgacgacgacttgacgaacataataatctaagtgtccagccttctggtgcaccat

SEQ ID NO: 5997 - DNA, 48 bp, Artificial Sequence
  Description of Artificial Sequence: Synthetic oligonucleotide
  Description of Combined DNA/RNA Molecule: Synthetic oligonucleotide
tctgccagaacaccgacaccaggtgcctgagttgcatgtgccacagaa

SEQ ID NO: 5998 - DNA, 53 bp, Artificial Sequence
  Description of Artificial Sequence: Synthetic oligonucleotide
cagggttccttaaccacaaacagagcctcagtgggtgtgttggcgtacggtga

SEQ ID NO: 5999 - DNA, 28 bp, Artificial Sequence
  Description of Artificial Sequence: Synthetic probe
tttgtgccacagggttccttaaccacaa

SEQ ID NO: 6000 - DNA, 19 bp, Artificial Sequence
  Description of Artificial Sequence: Synthetic primer
tctgccagaacaccgacac

SEQ ID NO: 6001 - DNA, 19 bp, Artificial Sequence
  Description of Artificial Sequence: Synthetic primer
tcaccgtacgccaacacac

SEQ ID NO: 6002 - DNA, 45 bp, Artificial Sequence
  Description of Artificial Sequence: Synthetic primer
  Description of Combined DNA/RNA Molecule: Synthetic primer
tcaccgtacgccaacacacctggtgcaccactgaggctttgttta

SEQ ID NO: 6003 - DNA, 41 bp, Artificial Sequence
  Description of Artificial Sequence: Synthetic primer
  Description of Combined DNA/RNA Molecule: Synthetic primer
acgacgacgacgaacagctcaagtggatgaggcacaacagt

SEQ ID NO: 6004 - DNA, 41 bp, Artificial Sequence
  Description of Artificial Sequence: Synthetic primer
  Description of Combined DNA/RNA Molecule: Synthetic primer
acgacgacgacgaacaagtggatgaggcacaacagcugtga

SEQ ID NO: 6005 - DNA, 57 bp, Artificial Sequence
  Description of Artificial Sequence: Synthetic primer
  Description of Combined DNA/RNA Molecule: Synthetic primer
acgacgacgacttgacgaacataatgggtatgtgataggaacacatctggccutcta

SEQ ID NO: 6006 - DNA, 47 bp, Artificial Sequence
  Description of Artificial Sequence: Synthetic oligonucleotide
  Description of Combined DNA/RNA Molecule: Synthetic oligonucleotide
tccggatcaaagcagccaccaccactgcaagtcaccaggccaccaaa

SEQ ID NO: 6007 - DNA, 41 bp, Artificial Sequence
  Description of Artificial Sequence: Synthetic oligonucleotide
ccaggagccaaggaggcttcccgtgtgttggcgtacggtga

SEQ ID NO: 6008 - DNA, 21 bp, Artificial Sequence
  Description of Artificial Sequence: Synthetic probe
ttcaggccaccaggagccaag

SEQ ID NO: 6009 - DNA, 19 bp, Artificial Sequence
  Description of Artificial Sequence: Synthetic primer
tccggatcaaagcagccac

SEQ ID NO: 6010 - DNA, 19 bp, Artificial Sequence
  Description of Artificial Sequence: Synthetic primer
tcaccgtacgccaacacac

SEQ ID NO: 6011 - DNA, 50 bp, Artificial Sequence
  Description of Artificial Sequence: Synthetic primer
  Description of Combined DNA/RNA Molecule: Synthetic primer
tcaccgtacgccaacacactgtgataggaacacatctggccttttggtga

SEQ ID NO: 6012 - DNA, 48 bp, Artificial Sequence
  Description of Artificial Sequence: Synthetic primer
  Description of Combined DNA/RNA Molecule: Synthetic primer
acgacgacgacgaaaagcttgttgaagtttacattcccttgcactgga

SEQ ID NO: 6013 - DNA, 49 bp, Artificial Sequence
  Description of Artificial Sequence: Synthetic primer
  Description of Combined DNA/RNA Molecule: Synthetic primer
acgacgacgacgaacttgttgaagtttacattcccttgcactggggcaa

SEQ ID NO: 6014 - DNA, 53 bp, Artificial Sequence
  Description of Artificial Sequence: Synthetic primer
  Description of Combined DNA/RNA Molecule: Synthetic primer
acgacgacgacttgacgaacataatccaaaactatgcagcctctgctgugata

SEQ ID NO: 6015 - DNA, 49 bp, Artificial Sequence
  Description of Artificial Sequence: Synthetic oligonucleotide
  Description of Combined DNA/RNA Molecule: Synthetic oligonucleotide
ttctagataccacggacgcacgaaaggaacccacagcccaggcaggatg

SEQ ID NO: 6016 - DNA, 51 bp, Artificial Sequence
  Description of Artificial Sequence: Synthetic oligonucleotide
ggacagtcaaccaaagcaggatggagagagggtgttggtgtgcaaagctga

SEQ ID NO: 6017 - DNA, 28 bp, Artificial Sequence
  Description of Artificial Sequence: Synthetic probe
ttccaggcaggacagtcaaccaaagcag

SEQ ID NO: 6018 - DNA, 21 bp, Artificial Sequence
  Description of Artificial Sequence: Synthetic primer
ttctagataccacggacgcac

SEQ ID NO: 6019 - DNA, 20 bp, Artificial Sequence
  Description of Artificial Sequence: Synthetic primer
tcagctttgcacaccaacac

SEQ ID NO: 6020 - DNA, 49 bp, Artificial Sequence
  Description of Artificial Sequence: Synthetic primer
  Description of Combined DNA/RNA Molecule: Synthetic primer
tcagctttgcacaccaacacccaaaactatgcagcctctgctatgatga

SEQ ID NO: 6021 - DNA, 42 bp, Artificial Sequence
  Description of Artificial Sequence: Synthetic primer
  Description of Combined DNA/RNA Molecule: Synthetic primer
acgacgacgacgaacagtgctcacaaggtggtgctcacccac

SEQ ID NO: 6022 - DNA, 42 bp, Artificial Sequence
  Description of Artificial Sequence: Synthetic primer
  Description of Combined DNA/RNA Molecule: Synthetic primer
acgacgacgacgaacacaaggtggtgctcacccatgaggatt

SEQ ID NO: 6023 - DNA, 57 bp, Artificial Sequence
  Description of Artificial Sequence: Synthetic primer
  Description of Combined DNA/RNA Molecule: Synthetic primer
acgacgacgacttgacgaacataatcttccagttgttgtggagggagaagtauggcg

SEQ ID NO: 6024 - DNA, 50 bp, Artificial Sequence
  Description of Artificial Sequence: Synthetic oligonucleotide
  Description of Combined DNA/RNA Molecule: Synthetic oligonucleotide
tatgcggaccgatgactcaagcacacattctccacaccagtcgcacatgc

SEQ ID NO: 6025 - DNA, 55 bp, Artificial Sequence
  Description of Artificial Sequence: Synthetic oligonucleotide
catatcagcagccaccccaacaaatgcatcttgttgcttggcttgatctacctga

SEQ ID NO: 6026 - DNA, 26 bp, Artificial Sequence
  Description of Artificial Sequence: Synthetic probe
ttagtcgcacatatcagcagccaccc

SEQ ID NO: 6027 - DNA, 20 bp, Artificial Sequence
  Description of Artificial Sequence: Synthetic primer
tatgcggaccgatgactcaa

SEQ ID NO: 6028 - DNA, 22 bp, Artificial Sequence
  Description of Artificial Sequence: Synthetic primer
tcaggtagatcaagccaagcaa

SEQ ID NO: 6029 - DNA, 57 bp, Artificial Sequence
  Description of Artificial Sequence: Synthetic primer
  Description of Combined DNA/RNA Molecule: Synthetic primer
tcaggtagatcaagccaagcaagagggagaagtatggcaatgtgttcaaggtgcatc

SEQ ID NO: 6030 - DNA, 40 bp, Artificial Sequence
  Description of Artificial Sequence: Synthetic primer
  Description of Combined DNA/RNA Molecule: Synthetic primer
acgacgacgacgaagcacaggactcagcagccacaccaga

SEQ ID NO: 6031 - DNA, 39 bp, Artificial Sequence
  Description of Artificial Sequence: Synthetic primer
  Description of Combined DNA/RNA Molecule: Synthetic primer
acgacgacgacgaacagaggcacaggactcagcagccat

SEQ ID NO: 6032 - DNA, 52 bp, Artificial Sequence
  Description of Artificial Sequence: Synthetic primer
  Description of Combined DNA/RNA Molecule: Synthetic primer
acgacgacgacttgacgaacataatgctgggacatggtggtgctgaaatact

SEQ ID NO: 6033 - DNA, 46 bp, Artificial Sequence
  Description of Artificial Sequence: Synthetic oligonucleotide
  Description of Combined DNA/RNA Molecule: Synthetic oligonucleotide
ttgaaggaggaaatcggcacaaccaggaggagggtcagacaggttc

SEQ ID NO: 6034 - DNA, 47 bp, Artificial Sequence
  Description of Artificial Sequence: Synthetic oligonucleotide
ggtctcaacccctcctcacccccagtgtcgaaccgttttaggactga

SEQ ID NO: 6035 - DNA, 25 bp, Artificial Sequence
  Description of Artificial Sequence: Synthetic probe
tttcagacaggtctcaacccctcct

SEQ ID NO: 6036 - DNA, 21 bp, Artificial Sequence
  Description of Artificial Sequence: Synthetic primer
ttgaaggaggaaatcggcaca

SEQ ID NO: 6037 - DNA, 22 bp, Artificial Sequence
  Description of Artificial Sequence: Synthetic primer
tcagtcctaaaacggttcgaca

SEQ ID NO: 6038 - DNA, 45 bp, Artificial Sequence
  Description of Artificial Sequence: Synthetic primer
  Description of Combined DNA/RNA Molecule: Synthetic primer
tcagtcctaaaacggttcgacagagtgggagcctgggagtgaggg

SEQ ID NO: 6039 - DNA, 37 bp, Artificial Sequence
  Description of Artificial Sequence: Synthetic primer
  Description of Combined DNA/RNA Molecule: Synthetic primer
acgacgacgacgaactgcccagcactgtggcauggga

SEQ ID NO: 6040 - DNA, 38 bp, Artificial Sequence
  Description of Artificial Sequence: Synthetic primer
  Description of Combined DNA/RNA Molecule: Synthetic primer
acgacgacgacgaagagaggctgcccagcactguggcg

SEQ ID NO: 6041 - DNA, 54 bp, Artificial Sequence
  Description of Artificial Sequence: Synthetic primer
  Description of Combined DNA/RNA Molecule: Synthetic primer
acgacgacgacttgacgaacataatgcccacaaggattgaattggcagagtcct

SEQ ID NO: 6042 - DNA, 42 bp, Artificial Sequence
  Description of Artificial Sequence: Synthetic oligonucleotide
  Description of Combined DNA/RNA Molecule: Synthetic oligonucleotide
ttcggcaggctacggtacaggtgaggacagccagacagtttt

SEQ ID NO: 6043 - DNA, 51 bp, Artificial Sequence
  Description of Artificial Sequence: Synthetic oligonucleotide
gttcccccacccactagcaagaacacaggtgtcgaaccgttttaggactga

SEQ ID NO: 6044 - DNA, 26 bp, Artificial Sequence
  Description of Artificial Sequence: Synthetic probe
ttccagacagttcccccacccactag

SEQ ID NO: 6045 - DNA, 19 bp, Artificial Sequence
  Description of Artificial Sequence: Synthetic primer
ttcggcaggctacggtaca

SEQ ID NO: 6046 - DNA, 22 bp, Artificial Sequence
  Description of Artificial Sequence: Synthetic primer
tcagtcctaaaacggttcgaca

SEQ ID NO: 6047 - DNA, 50 bp, Artificial Sequence
  Description of Artificial Sequence: Synthetic primer
  Description of Combined DNA/RNA Molecule: Synthetic primer
tcagtcctaaaacggttcgacagcagagtccctgcctgtgttcctgctaa

SEQ ID NO: 6048 - DNA, 38 bp, Artificial Sequence
  Description of Artificial Sequence: Synthetic primer
  Description of Combined DNA/RNA Molecule: Synthetic primer
acgacgacgacgaaggttctggcagcagcaccaggtcc

SEQ ID NO: 6049 - DNA, 38 bp, Artificial Sequence
  Description of Artificial Sequence: Synthetic primer
  Description of Combined DNA/RNA Molecule: Synthetic primer
acgacgacgacgaactggcagcagcaccaggtcugcta

SEQ ID NO: 6050 - DNA, 53 bp, Artificial Sequence
  Description of Artificial Sequence: Synthetic primer
  Description of Combined DNA/RNA Molecule: Synthetic primer
acgacgacgacttgacgaacataatatgacttctgaggtgctggaggcuattc

SEQ ID NO: 6051 - DNA, 49 bp, Artificial Sequence
  Description of Artificial Sequence: Synthetic oligonucleotide
  Description of Combined DNA/RNA Molecule: Synthetic oligonucleotide
tctcgacgatgaaaagcaacactgcaggtctcccacattcatcagctac

SEQ ID NO: 6052 - DNA, 40 bp, Artificial Sequence
  Description of Artificial Sequence: Synthetic oligonucleotide
gctgtggcacccagcaccaggtgtgggtactgtccgtgga

SEQ ID NO: 6053 - DNA, 25 bp, Artificial Sequence
  Description of Artificial Sequence: Synthetic probe
ccttcatcagctgtggcacccagca

SEQ ID NO: 6054 - DNA, 21 bp, Artificial Sequence
  Description of Artificial Sequence: Synthetic primer
tctcgacgatgaaaagcaaca

SEQ ID NO: 6055 - DNA, 19 bp, Artificial Sequence
  Description of Artificial Sequence: Synthetic primer
tccacggacagtacccaca

SEQ ID NO: 6056 - DNA, 53 bp, Artificial Sequence
  Description of Artificial Sequence: Synthetic primer
  Description of Combined DNA/RNA Molecule: Synthetic primer
tccacggacagtacccacagtgctggaggctatttctggattttgtatggccc

SEQ ID NO: 6057 - DNA, 37 bp, Artificial Sequence
  Description of Artificial Sequence: Synthetic primer
  Description of Combined DNA/RNA Molecule: Synthetic primer
acgacgacgacgaagaacagcagcagggcccagggac

SEQ ID NO: 6058 - DNA, 40 bp, Artificial Sequence
  Description of Artificial Sequence: Synthetic primer
  Description of Combined DNA/RNA Molecule: Synthetic primer
acgacgacgacgaacctctgctgggaacagcagcagggct

SEQ ID NO: 6059 - DNA, 50 bp, Artificial Sequence
  Description of Artificial Sequence: Synthetic primer
  Description of Combined DNA/RNA Molecule: Synthetic primer
acgacgacgacttgacgaacataattggaggttgtgtggccagccccaga

SEQ ID NO: 6060 - DNA, 45 bp, Artificial Sequence
  Description of Artificial Sequence: Synthetic oligonucleotide
  Description of Combined DNA/RNA Molecule: Synthetic oligonucleotide
ttctaggcgacacgacaacagaggcattgtggcagtgacauggtg

SEQ ID NO: 6061 - DNA, 38 bp, Artificial Sequence
  Description of Artificial Sequence: Synthetic oligonucleotide
tggcagtgggctctgggcctgtgggtactgtccgtgga

SEQ ID NO: 6062 - DNA, 25 bp, Artificial Sequence
  Description of Artificial Sequence: Synthetic probe
ttagtgacatggcagtgggctctgg

SEQ ID NO: 6063 - DNA, 20 bp, Artificial Sequence
  Description of Artificial Sequence: Synthetic primer
ttctaggcgacacgacaaca

SEQ ID NO: 6064 - DNA, 19 bp, Artificial Sequence
  Description of Artificial Sequence: Synthetic primer
tccacggacagtacccaca

SEQ ID NO: 6065 - DNA, 44 bp, Artificial Sequence
  Description of Artificial Sequence: Synthetic primer
  Description of Combined DNA/RNA Molecule: Synthetic primer
tccacggacagtacccacacagccccaggtcacaccaatgaact

SEQ ID NO: 6066 - DNA, 41 bp, Artificial Sequence
  Description of Artificial Sequence: Synthetic primer
  Description of Combined DNA/RNA Molecule: Synthetic primer
acgacgacgacgaagagctcacacagcacacctgcagccaa

SEQ ID NO: 6067 - DNA, 42 bp, Artificial Sequence
  Description of Artificial Sequence: Synthetic primer
  Description of Combined DNA/RNA Molecule: Synthetic primer
acgacgacgacgaacacaggagctcacacagcacaccugcaa

SEQ ID NO: 6068 - DNA, 54 bp, Artificial Sequence
  Description of Artificial Sequence: Synthetic primer
  Description of Combined DNA/RNA Molecule: Synthetic primer
acgacgacgacttgacgaacataatccccttggaagaccctgatggaacaatta

SEQ ID NO: 6069 - DNA, 49 bp, Artificial Sequence
  Description of Artificial Sequence: Synthetic oligonucleotide
  Description of Combined DNA/RNA Molecule: Synthetic oligonucleotide
tttcaggccctaaccaccacgggcaatcaggttctcagttctcagagct

SEQ ID NO: 6070 - DNA, 56 bp, Artificial Sequence
  Description of Artificial Sequence: Synthetic oligonucleotide
gagtcccagttcccagtttccagtttccttatcaacgtgggattaagggcgatgga

SEQ ID NO: 6071 - DNA, 32 bp, Artificial Sequence
  Description of Artificial Sequence: Synthetic probe
ttgttctcagagtcccagttcccagtttccag

SEQ ID NO: 6072 - DNA, 20 bp, Artificial Sequence
  Description of Artificial Sequence: Synthetic primer
tttcaggccctaaccaccac

SEQ ID NO: 6073 - DNA, 20 bp, Artificial Sequence
  Description of Artificial Sequence: Synthetic primer
tccatcgcccttaatcccac

SEQ ID NO: 6074 - DNA, 55 bp, Artificial Sequence
  Description of Artificial Sequence: Synthetic primer
  Description of Combined DNA/RNA Molecule: Synthetic primer
tccatcgcccttaatcccaccttggaagaccctgatggaacaattgtgctgatag

SEQ ID NO: 6075 - DNA, 49 bp, Artificial Sequence
  Description of Artificial Sequence: Synthetic primer
  Description of Combined DNA/RNA Molecule: Synthetic primer
acgacgacgacgaaggaggtaaaaacccattttatgagggaacauaatc

SEQ ID NO: 6076 - DNA, 53 bp, Artificial Sequence
  Description of Artificial Sequence: Synthetic primer
  Description of Combined DNA/RNA Molecule: Synthetic primer
acgacgacgacgaaggaaagaaatggaggtaaaaacccattttatgggggaat

SEQ ID NO: 6077 - DNA, 54 bp, Artificial Sequence
  Description of Artificial Sequence: Synthetic primer
  Description of Combined DNA/RNA Molecule: Synthetic primer
acgacgacgacttgacgaacataatagcagctgaatggtccccattctggtaac

SEQ ID NO: 6078 - DNA, 56 bp, Artificial Sequence
  Description of Artificial Sequence: Synthetic oligonucleotide
  Description of Combined DNA/RNA Molecule: Synthetic oligonucleotide
tatctcctaaaagaagccgcacgtgagcaggatgcactctctttagaaccacattt

SEQ ID NO: 6079 - DNA, 52 bp, Artificial Sequence
  Description of Artificial Sequence: Synthetic oligonucleotide
catcctcccaaatgctcccaccatcccattacgtgggattaagggcgatgga

SEQ ID NO: 6080 - DNA, 28 bp, Artificial Sequence
  Description of Artificial Sequence: Synthetic probe
aaagaaccacatcctcccaaatgctccc

SEQ ID NO: 6081 - DNA, 22 bp, Artificial Sequence
  Description of Artificial Sequence: Synthetic primer
tatctcctaaaagaagccgcac

SEQ ID NO: 6082 - DNA, 20 bp, Artificial Sequence
  Description of Artificial Sequence: Synthetic primer
tccatcgcccttaatcccac

SEQ ID NO: 6083 - DNA, 52 bp, Artificial Sequence
  Description of Artificial Sequence: Synthetic primer
  Description of Combined DNA/RNA Molecule: Synthetic primer
tccatcgcccttaatcccacgaatggtccccattctggtaatgggctggtga

SEQ ID NO: 6084 - DNA, 42 bp, Artificial Sequence
  Description of Artificial Sequence: Synthetic primer
  Description of Combined DNA/RNA Molecule: Synthetic primer
acgacgacgacgaaccttcagagctgcacaagcaccaggagt

SEQ ID NO: 6085 - DNA, 41 bp, Artificial Sequence
  Description of Artificial Sequence: Synthetic primer
  Description of Combined DNA/RNA Molecule: Synthetic primer
acgacgacgacgaacagagctgcacaagcaccaggagctgc

SEQ ID NO: 6086 - DNA, 51 bp, Artificial Sequence
  Description of Artificial Sequence: Synthetic primer
  Description of Combined DNA/RNA Molecule: Synthetic primer
acgacgacgacttgacgaacataatctccactggtctgctctgccccccat

SEQ ID NO: 6087 - DNA, 45 bp, Artificial Sequence
  Description of Artificial Sequence: Synthetic oligonucleotide
  Description of Combined DNA/RNA Molecule: Synthetic oligonucleotide
tcgctcttcagcctcctacagtgggcacatgaggaggacaagcga

SEQ ID NO: 6088 - DNA, 51 bp, Artificial Sequence
  Description of Artificial Sequence: Synthetic oligonucleotide
agcaggtcctaggtgcatagacccatgggtgttctgggaattattgccgga

SEQ ID NO: 6089 - DNA, 31 bp, Artificial Sequence
  Description of Artificial Sequence: Synthetic probe
ttgaggacaagcaggtcctaggtgcatagac

SEQ ID NO: 6090 - DNA, 20 bp, Artificial Sequence
  Description of Artificial Sequence: Synthetic primer
tcgctcttcagcctcctaca

SEQ ID NO: 6091 - DNA, 22 bp, Artificial Sequence
  Description of Artificial Sequence: Synthetic primer
tccggcaataattcccagaaca

SEQ ID NO: 6092 - DNA, 45 bp, Artificial Sequence
  Description of Artificial Sequence: Synthetic primer
  Description of Combined DNA/RNA Molecule: Synthetic primer
tccggcaataattcccagaacagctctgccccccacccgtgggtt

SEQ ID NO: 6093 - DNA, 51 bp, Artificial Sequence
  Description of Artificial Sequence: Synthetic primer
  Description of Combined DNA/RNA Molecule: Synthetic primer
acgacgacgacgaacattgacatccatgactgttatgttgacctcagtgcc

SEQ ID NO: 6094 - DNA, 48 bp, Artificial Sequence
  Description of Artificial Sequence: Synthetic primer
  Description of Combined DNA/RNA Molecule: Synthetic primer
acgacgacgacgaacatgactgttatgttgacctcagtgctgcugcaa

SEQ ID NO: 6095 - DNA, 53 bp, Artificial Sequence
  Description of Artificial Sequence: Synthetic primer
  Description of Combined DNA/RNA Molecule: Synthetic primer
acgacgacgacttgacgaacataatgcccctggatcatgagatgcagcctgta

SEQ ID NO: 6096 - DNA, 43 bp, Artificial Sequence
  Description of Artificial Sequence: Synthetic oligonucleotide
  Description of Combined DNA/RNA Molecule: Synthetic oligonucleotide
tcactatcggcgtagtcaccaaggctgaggcactgtcaagcca

SEQ ID NO: 6097 - DNA, 45 bp, Artificial Sequence
  Description of Artificial Sequence: Synthetic oligonucleotide
agctgcacctgcaccatgagcacaatggtgactttacccggagga

SEQ ID NO: 6098 - DNA, 27 bp, Artificial Sequence
  Description of Artificial Sequence: Synthetic probe
ttactgtcaagctgcacctgcaccatg

SEQ ID NO: 6099 - DNA, 21 bp, Artificial Sequence
  Description of Artificial Sequence: Synthetic primer
tcactatcggcgtagtcacca

SEQ ID NO: 6100 - DNA, 20 bp, Artificial Sequence
  Description of Artificial Sequence: Synthetic primer
tcctccgggtaaagtcacca

SEQ ID NO: 6101 - DNA, 48 bp, Artificial Sequence
  Description of Artificial Sequence: Synthetic primer
  Description of Combined DNA/RNA Molecule: Synthetic primer
tcctccgggtaaagtcaccaccctggatcatgagatgcagcttgtggc

SEQ ID NO: 6102 - DNA, 44 bp, Artificial Sequence
  Description of Artificial Sequence: Synthetic primer
  Description of Combined DNA/RNA Molecule: Synthetic primer
acgacgacgacgaacaacccaaacctacctgaaagcacauctcc

SEQ ID NO: 6103 - DNA, 46 bp, Artificial Sequence
  Description of Artificial Sequence: Synthetic primer
  Description of Combined DNA/RNA Molecule: Synthetic primer
acgacgacgacgaaacccaaacctacctgaaagcacatctcugcaa

SEQ ID NO: 6104 - DNA, 54 bp, Artificial Sequence
  Description of Artificial Sequence: Synthetic primer
  Description of Combined DNA/RNA Molecule: Synthetic primer
acgacgacgacttgacgaacataatggctttggcctttggaaaatgcaaucctc

SEQ ID NO: 6105 - DNA, 48 bp, Artificial Sequence
  Description of Artificial Sequence: Synthetic oligonucleotide
  Description of Combined DNA/RNA Molecule: Synthetic oligonucleotide
ttcgtacctcggcacaccagtcccactggacttctccagcccaaacct

SEQ ID NO: 6106 - DNA, 53 bp, Artificial Sequence
  Description of Artificial Sequence: Synthetic oligonucleotide
aactcctaatctcagcccagaatccagccatattggctccgttactctgtcga

SEQ ID NO: 6107 - DNA, 32 bp, Artificial Sequence
  Description of Artificial Sequence: Synthetic probe
aacagcccaaactcctaatctcagcccagaat

SEQ ID NO: 6108 - DNA, 19 bp, Artificial Sequence
  Description of Artificial Sequence: Synthetic primer
ttcgtacctcggcacacca

SEQ ID NO: 6109 - DNA, 20 bp, Artificial Sequence
  Description of Artificial Sequence: Synthetic primer
tcgacagagtaacggagcca

SEQ ID NO: 6110 - DNA, 51 bp, Artificial Sequence
  Description of Artificial Sequence: Synthetic primer
  Description of Combined DNA/RNA Molecule: Synthetic primer
acgacgacgacgaacacagagttgttcttgattgtaagggacttcacccat

SEQ ID NO: 6111 - DNA, 50 bp, Artificial Sequence
  Description of Artificial Sequence: Synthetic primer
  Description of Combined DNA/RNA Molecule: Synthetic primer
acgacgacgacgaagttgttcttgattgtaagggacttcacccacutggc

SEQ ID NO: 6112 - DNA, 50 bp, Artificial Sequence
  Description of Artificial Sequence: Synthetic primer
  Description of Combined DNA/RNA Molecule: Synthetic primer
acgacgacgacttgacgaacataatcaccttcctggctcctggccuggaa

SEQ ID NO: 6113 - DNA, 50 bp, Artificial Sequence
  Description of Artificial Sequence: Synthetic oligonucleotide
  Description of Combined DNA/RNA Molecule: Synthetic oligonucleotide
tctacagctagatgcggccaggagagccagtcctcattccaggcaucctg

SEQ ID NO: 6114 - DNA, 47 bp, Artificial Sequence
  Description of Artificial Sequence: Synthetic oligonucleotide
tcccacacagcagtcactcatggctcctggctccgttactctgtcga

SEQ ID NO: 6115 - DNA, 23 bp, Artificial Sequence
  Description of Artificial Sequence: Synthetic probe
aaccaggcatcccacacagcagt

SEQ ID NO: 6116 - DNA, 20 bp, Artificial Sequence
  Description of Artificial Sequence: Synthetic primer
tctacagctagatgcggcca

SEQ ID NO: 6117 - DNA, 20 bp, Artificial Sequence
  Description of Artificial Sequence: Synthetic primer
tcgacagagtaacggagcca

SEQ ID NO: 6118 - DNA, 45 bp, Artificial Sequence
  Description of Artificial Sequence: Synthetic primer
  Description of Combined DNA/RNA Molecule: Synthetic primer
tcgacagagtaacggagccagcctggagggagccatgaatgacta

SEQ ID NO: 6119 - DNA, 46 bp, Artificial Sequence
  Description of Artificial Sequence: Synthetic primer
  Description of Combined DNA/RNA Molecule: Synthetic primer
acgacgacgacgaagcctctcttaccttcatctctcttgcacttgc

SEQ ID NO: 6120 - DNA, 49 bp, Artificial Sequence
  Description of Artificial Sequence: Synthetic primer
  Description of Combined DNA/RNA Molecule: Synthetic primer
acgacgacgacgaacctctcttaccttcatctctcttgcacttgutggc

SEQ ID NO: 6121 - DNA, 52 bp, Artificial Sequence
  Description of Artificial Sequence: Synthetic primer
  Description of Combined DNA/RNA Molecule: Synthetic primer
acgacgacgacttgacgaacataatggtgagcatggatttggctggcutgtc

SEQ ID NO: 6122 - DNA, 47 bp, Artificial Sequence
  Description of Artificial Sequence: Synthetic oligonucleotide
  Description of Combined DNA/RNA Molecule: Synthetic oligonucleotide
tagcgatagtaccgacagtcacggtgtcagcactagggaacaugaca

SEQ ID NO: 6123 - DNA, 50 bp, Artificial Sequence
  Description of Artificial Sequence: Synthetic oligonucleotide
tgatgcccaggatgccactgatggagtacagtgcggaaacctatcgtcga

SEQ ID NO: 6124 - DNA, 26 bp, Artificial Sequence
  Description of Artificial Sequence: Synthetic probe
aagggaacatgatgcccaggatgcca

SEQ ID NO: 6125 - DNA, 22 bp, Artificial Sequence
  Description of Artificial Sequence: Synthetic primer
tagcgatagtaccgacagtcac

SEQ ID NO: 6126 - DNA, 20 bp, Artificial Sequence
  Description of Artificial Sequence: Synthetic primer
tcgacgataggtttccgcac

SEQ ID NO: 6127 - DNA, 49 bp, Artificial Sequence
  Description of Artificial Sequence: Synthetic primer
  Description of Combined DNA/RNA Molecule: Synthetic primer
tcgacgataggtttccgcacgagcatggatttggctggcttgctgtacc

SEQ ID NO: 6128 - DNA, 48 bp, Artificial Sequence
  Description of Artificial Sequence: Synthetic primer
  Description of Combined DNA/RNA Molecule: Synthetic primer
acgacgacgacgaacaacagatagaatgcacagggtcaagacagtgtt

SEQ ID NO: 6129 - DNA, 42 bp, Artificial Sequence
  Description of Artificial Sequence: Synthetic primer
  Description of Combined DNA/RNA Molecule: Synthetic primer
acgacgacgacgaacctccccaggagcacaacagatagaata

SEQ ID NO: 6130 - DNA, 51 bp, Artificial Sequence
  Description of Artificial Sequence: Synthetic primer
  Description of Combined DNA/RNA Molecule: Synthetic primer
acgacgacgacttgacgaacataatgtgcaggtcctgctactgcccuccag

SEQ ID NO: 6131 - DNA, 44 bp, Artificial Sequence
  Description of Artificial Sequence: Synthetic oligonucleotide
  Description of Combined DNA/RNA Molecule: Synthetic oligonucleotide
tccagggtatttggcgcaccagtagcagaggccacaacacttca

SEQ ID NO: 6132 - DNA, 45 bp, Artificial Sequence
  Description of Artificial Sequence: Synthetic oligonucleotide
ctttgcaaagccagcctctgcccccgtgcggaaacctatcgtcga

SEQ ID NO: 6133 - DNA, 29 bp, Artificial Sequence
  Description of Artificial Sequence: Synthetic probe
ttcacaacactttgcaaagccagcctctg

SEQ ID NO: 6134 - DNA, 19 bp, Artificial Sequence
  Description of Artificial Sequence: Synthetic primer
tccagggtatttggcgcac

SEQ ID NO: 6135 - DNA, 20 bp, Artificial Sequence
  Description of Artificial Sequence: Synthetic primer
tcgacgataggtttccgcac

SEQ ID NO: 6136 - DNA, 46 bp, Artificial Sequence
  Description of Artificial Sequence: Synthetic primer
  Description of Combined DNA/RNA Molecule: Synthetic primer
tcgacgataggtttccgcacctactgccctccaaggaggttgggaa

SEQ ID NO: 6137 - DNA, 47 bp, Artificial Sequence
  Description of Artificial Sequence: Synthetic primer
  Description of Combined DNA/RNA Molecule: Synthetic primer
acgacgacgacgaaaaagcctttgccacaaaattcacagacaaagga

SEQ ID NO: 6138 - DNA, 47 bp, Artificial Sequence
  Description of Artificial Sequence: Synthetic primer
  Description of Combined DNA/RNA Molecule: Synthetic primer
acgacgacgacgaatttgccacaaaattcacagacaaagggcutgtg

SEQ ID NO: 6139 - DNA, 55 bp, Artificial Sequence
  Description of Artificial Sequence: Synthetic primer
  Description of Combined DNA/RNA Molecule: Synthetic primer
acgacgacgacttgacgaacataatgccacataaatgcaaccagtgtggcaaagc

SEQ ID NO: 6140 - DNA, 52 bp, Artificial Sequence
  Description of Artificial Sequence: Synthetic oligonucleotide
  Description of Combined DNA/RNA Molecule: Synthetic oligonucleotide
tccctcgtcatctcccttaccgtagcccacatggatgcagatatacaugtca

SEQ ID NO: 6141 - DNA, 48 bp, Artificial Sequence
  Description of Artificial Sequence: Synthetic oligonucleotide
tgttgagcatggagctgcagttgaacactggtcttggtgatggagcga

SEQ ID NO: 6142 - DNA, 32 bp, Artificial Sequence
  Description of Artificial Sequence: Synthetic probe
ttatatacatgttgagcatggagctgcagttg

SEQ ID NO: 6143 - DNA, 21 bp, Artificial Sequence
  Description of Artificial Sequence: Synthetic primer
tccctcgtcatctcccttacc

SEQ ID NO: 6144 - DNA, 19 bp, Artificial Sequence
  Description of Artificial Sequence: Synthetic primer
tcgctccatcaccaagacc

SEQ ID NO: 6145 - DNA, 52 bp, Artificial Sequence
  Description of Artificial Sequence: Synthetic primer
  Description of Combined DNA/RNA Molecule: Synthetic primer
tcgctccatcaccaagacccacataaatgcaaccagtgtggcaaaatgttcg

SEQ ID NO: 6146 - DNA, 40 bp, Artificial Sequence
  Description of Artificial Sequence: Synthetic primer
  Description of Combined DNA/RNA Molecule: Synthetic primer
acgacgacgacgaagccaccaatggcaccaggacauatga

SEQ ID NO: 6147 - DNA, 44 bp, Artificial Sequence
  Description of Artificial Sequence: Synthetic primer
  Description of Combined DNA/RNA Molecule: Synthetic primer
acgacgacgacgaacaccaatggcaccaggacatatggagccaa

SEQ ID NO: 6148 - DNA, 49 bp, Artificial Sequence
  Description of Artificial Sequence: Synthetic primer
  Description of Combined DNA/RNA Molecule: Synthetic primer
acgacgacgacttgacgaacataatcccaccatggcatctggccctgta

SEQ ID NO: 6149 - DNA, 51 bp, Artificial Sequence
  Description of Artificial Sequence: Synthetic oligonucleotide
  Description of Combined DNA/RNA Molecule: Synthetic oligonucleotide
tacgaatcacccgagagttcaacacaggatcttggagacacagtcauggag

SEQ ID NO: 6150 - DNA, 49 bp, Artificial Sequence
  Description of Artificial Sequence: Synthetic oligonucleotide
tgggacacacacagctggcacaagatgttgtgggtgggtataggtcaga

SEQ ID NO: 6151 - DNA, 27 bp, Artificial Sequence
  Description of Artificial Sequence: Synthetic probe
ttacagtcatgggacacacacagctgg

SEQ ID NO: 6152 - DNA, 22 bp, Artificial Sequence
  Description of Artificial Sequence: Synthetic primer
tacgaatcacccgagagttcaa

SEQ ID NO: 6153 - DNA, 22 bp, Artificial Sequence
  Description of Artificial Sequence: Synthetic primer
tctgacctatacccacccacaa

SEQ ID NO: 6154 - DNA, 51 bp, Artificial Sequence
  Description of Artificial Sequence: Synthetic primer
  Description of Combined DNA/RNA Molecule: Synthetic primer
tctgacctatacccacccacaagcatctggccctgtgtcatcttatgccaa

SEQ ID NO: 6155 - DNA, 41 bp, Artificial Sequence
  Description of Artificial Sequence: Synthetic primer
  Description of Combined DNA/RNA Molecule: Synthetic primer
acgacgacgacgaaggtgaattgtgcagcaggcacagggct

SEQ ID NO: 6156 - DNA, 36 bp, Artificial Sequence
  Description of Artificial Sequence: Synthetic primer
  Description of Combined DNA/RNA Molecule: Synthetic primer
acgacgacgacgaagcagcaggcacagggccctgga

SEQ ID NO: 6157 - DNA, 50 bp, Artificial Sequence
  Description of Artificial Sequence: Synthetic primer
  Description of Combined DNA/RNA Molecule: Synthetic primer
acgacgacgacttgacgaacataatccctgcttctcctgtgaggagtgga

SEQ ID NO: 6158 - DNA, 46 bp, Artificial Sequence
  Description of Artificial Sequence: Synthetic oligonucleotide
  Description of Combined DNA/RNA Molecule: Synthetic oligonucleotide
tacgaatcacccgagagttcaacctcctgggtcactgctcacagag

SEQ ID NO: 6159 - DNA, 59 bp, Artificial Sequence
  Description of Artificial Sequence: Synthetic oligonucleotide
caggataaagcaatttccaagcacccacaatatctccttgtgggtgggtataggtcaga

SEQ ID NO: 6160 - DNA, 34 bp, Artificial Sequence
  Description of Artificial Sequence: Synthetic probe
ttctgctcacaggataaagcaatttccaagcacc

SEQ ID NO: 6161 - DNA, 22 bp, Artificial Sequence
  Description of Artificial Sequence: Synthetic primer
tacgaatcacccgagagttcaa

SEQ ID NO: 6162 - DNA, 22 bp, Artificial Sequence
  Description of Artificial Sequence: Synthetic primer
tctgacctatacccacccacaa

SEQ ID NO: 6163 - DNA, 52 bp, Artificial Sequence
  Description of Artificial Sequence: Synthetic primer
  Description of Combined DNA/RNA Molecule: Synthetic primer
tctgacctatacccacccacaacctgtgaggagtgaggagatattatgggta

SEQ ID NO: 6164 - DNA, 36 bp, Artificial Sequence
  Description of Artificial Sequence: Synthetic primer
  Description of Combined DNA/RNA Molecule: Synthetic primer
acgacgacgacgaagcaggcagagggaggcagggct

SEQ ID NO: 6165 - DNA, 36 bp, Artificial Sequence
  Description of Artificial Sequence: Synthetic primer
  Description of Combined DNA/RNA Molecule: Synthetic primer
acgacgacgacgaacccacctggcaggcagggggaa

SEQ ID NO: 6166 - DNA, 53 bp, Artificial Sequence
  Description of Artificial Sequence: Synthetic primer
  Description of Combined DNA/RNA Molecule: Synthetic primer
acgacgacgacttgacgaacataatgcctgtctgctgctgcctaatgagctcg

SEQ ID NO: 6167 - DNA, 44 bp, Artificial Sequence
  Description of Artificial Sequence: Synthetic oligonucleotide
  Description of Combined DNA/RNA Molecule: Synthetic oligonucleotide
taggaacacggaggacatcaagccacccaagcccaatcaagttt

SEQ ID NO: 6168 - DNA, 44 bp, Artificial Sequence
  Description of Artificial Sequence: Synthetic oligonucleotide
agtccaaccaggtgccccctctttgtgggtgggtataggtcaga

SEQ ID NO: 6169 - DNA, 27 bp, Artificial Sequence
  Description of Artificial Sequence: Synthetic probe
ttccaatcaagtccaaccaggtgcccc

SEQ ID NO: 6170 - DNA, 21 bp, Artificial Sequence
  Description of Artificial Sequence: Synthetic primer
taggaacacggaggacatcaa

SEQ ID NO: 6171 - DNA, 22 bp, Artificial Sequence
  Description of Artificial Sequence: Synthetic primer
tctgacctatacccacccacaa

SEQ ID NO: 6172 - DNA, 53 bp, Artificial Sequence
  Description of Artificial Sequence: Synthetic primer
  Description of Combined DNA/RNA Molecule: Synthetic primer
tctgacctatacccacccacaactgcctaatgagctcaggtctaggttgagcg

SEQ ID NO: 6173 - DNA, 44 bp, Artificial Sequence
  Description of Artificial Sequence: Synthetic primer
  Description of Combined DNA/RNA Molecule: Synthetic primer
acgacgacgacgaacaggtttcctgtcattggcaccacaugcta

SEQ ID NO: 6174 - DNA, 42 bp, Artificial Sequence
  Description of Artificial Sequence: Synthetic primer
  Description of Combined DNA/RNA Molecule: Synthetic primer
acgacgacgacgaactgtcattggcaccacatgctgcagaag

SEQ ID NO: 6175 - DNA, 54 bp, Artificial Sequence
  Description of Artificial Sequence: Synthetic primer
  Description of Combined DNA/RNA Molecule: Synthetic primer
acgacgacgacttgacgaacataattcatgtaatgaagctgggctgcaagttcc

SEQ ID NO: 6176 - DNA, 44 bp, Artificial Sequence
  Description of Artificial Sequence: Synthetic oligonucleotide
  Description of Combined DNA/RNA Molecule: Synthetic oligonucleotide
ttgattgggatcgttcgcaccctgcaggccaccactacacccgc

SEQ ID NO: 6177 - DNA, 54 bp, Artificial Sequence
  Description of Artificial Sequence: Synthetic oligonucleotide
cccatgcatccatcacaggtacaattcacaccaggtggctcaataacgggcaga

SEQ ID NO: 6178 - DNA, 31 bp, Artificial Sequence
  Description of Artificial Sequence: Synthetic probe
ttcactacacccatgcatccatcacaggtac

SEQ ID NO: 6179 - DNA, 20 bp, Artificial Sequence
  Description of Artificial Sequence: Synthetic primer
ttgattgggatcgttcgcac

SEQ ID NO: 6180 - DNA, 20 bp, Artificial Sequence
  Description of Artificial Sequence: Synthetic primer
tctgcccgttattgagccac

SEQ ID NO: 6181 - DNA, 47 bp, Artificial Sequence
  Description of Artificial Sequence: Synthetic primer
  Description of Combined DNA/RNA Molecule: Synthetic primer
tctgcccgttattgagccacctgggctgcaagttctggtatgaatta

SEQ ID NO: 6182 - DNA, 38 bp, Artificial Sequence
  Description of Artificial Sequence: Synthetic primer
  Description of Combined DNA/RNA Molecule: Synthetic primer
acgacgacgacgaactgccctgcacacacaccacactt

SEQ ID NO: 6183 - DNA, 38 bp, Artificial Sequence
  Description of Artificial Sequence: Synthetic primer
  Description of Combined DNA/RNA Molecule: Synthetic primer
acgacgacgacgaaccctgccctgcacacacaccacat

SEQ ID NO: 6184 - DNA, 52 bp, Artificial Sequence
  Description of Artificial Sequence: Synthetic primer
  Description of Combined DNA/RNA Molecule: Synthetic primer
acgacgacgacttgacgaacataattgccccagaggagctgtttcccutgcg

SEQ ID NO: 6185 - DNA, 52 bp, Artificial Sequence
  Description of Artificial Sequence: Synthetic oligonucleotide
  Description of Combined DNA/RNA Molecule: Synthetic oligonucleotide
tatggactgtaccagcccaactcacacatacacccagtcctcacgcacacgt

SEQ ID NO: 6186 - DNA, 54 bp, Artificial Sequence
  Description of Artificial Sequence: Synthetic oligonucleotide
cacacacacacacactgttccccaccactctacttgaaactgaggcggtgttca

SEQ ID NO: 6187 - DNA, 29 bp, Artificial Sequence
  Description of Artificial Sequence: Synthetic probe
tttcacgcacacacacacacacactgttc

SEQ ID NO: 6188 - DNA, 20 bp, Artificial Sequence
  Description of Artificial Sequence: Synthetic primer
tatggactgtaccagcccaa

SEQ ID NO: 6189 - DNA, 21 bp, Artificial Sequence
  Description of Artificial Sequence: Synthetic primer
tgaacaccgcctcagtttcaa

SEQ ID NO: 6190 - DNA, 52 bp, Artificial Sequence
  Description of Artificial Sequence: Synthetic primer
  Description of Combined DNA/RNA Molecule: Synthetic primer
tgaacaccgcctcagtttcaaccttgcagtctagagggtagagtgatgggag

SEQ ID NO: 6191 - DNA, 39 bp, Artificial Sequence
  Description of Artificial Sequence: Synthetic primer
  Description of Combined DNA/RNA Molecule: Synthetic primer
acgacgacgacgaagggacactgcagaggttccaggccg

SEQ ID NO: 6192 - DNA, 38 bp, Artificial Sequence
  Description of Artificial Sequence: Synthetic primer
  Description of Combined DNA/RNA Molecule: Synthetic primer
acgacgacgacgaactgcagaggttccaggccaggcaa

SEQ ID NO: 6193 - DNA, 55 bp, Artificial Sequence
  Description of Artificial Sequence: Synthetic primer
  Description of Combined DNA/RNA Molecule: Synthetic primer
acgacgacgacttgacgaacataatgatgatgtggactctgtgctttgccagctt

SEQ ID NO: 6194 - DNA, 57 bp, Artificial Sequence
  Description of Artificial Sequence: Synthetic oligonucleotide
  Description of Combined DNA/RNA Molecule: Synthetic oligonucleotide
tgtgcactagtccacgtgaaacagatccaatattcagtgccagaagagatcaaaaga

SEQ ID NO: 6195 - DNA, 55 bp, Artificial Sequence
  Description of Artificial Sequence: Synthetic oligonucleotide
aaaagggctccttcatgggcaatatctccaagggtttccgcgatctttgcattca

SEQ ID NO: 6196 - DNA, 33 bp, Artificial Sequence
  Description of Artificial Sequence: Synthetic probe
ttgagatcaaaaagggctccttcatgggcaata

SEQ ID NO: 6197 - DNA, 22 bp, Artificial Sequence
  Description of Artificial Sequence: Synthetic primer
tgtgcactagtccacgtgaaac

SEQ ID NO: 6198 - DNA, 22 bp, Artificial Sequence
  Description of Artificial Sequence: Synthetic primer
tgaatgcaaagatcgcggaaac

SEQ ID NO: 6199 - DNA, 50 bp, Artificial Sequence
  Description of Artificial Sequence: Synthetic primer
  Description of Combined DNA/RNA Molecule: Synthetic primer
tgaatgcaaagatcgcggaaacgactctgtgctttgccagctcttgggat

SEQ ID NO: 6200 - DNA, 40 bp, Artificial Sequence
  Description of Artificial Sequence: Synthetic primer
  Description of Combined DNA/RNA Molecule: Synthetic primer
acgacgacgacgaagccacacagcccacagaagcagaacg

SEQ ID NO: 6201 - DNA, 41 bp, Artificial Sequence
  Description of Artificial Sequence: Synthetic primer
  Description of Combined DNA/RNA Molecule: Synthetic primer
acgacgacgacgaattcatccagccacacagcccacagaaa

SEQ ID NO: 6202 - DNA, 50 bp, Artificial Sequence
  Description of Artificial Sequence: Synthetic primer
  Description of Combined DNA/RNA Molecule: Synthetic primer
acgacgacgacttgacgaacataatggcaggaagatggcagccacucttc

SEQ ID NO: 6203 - DNA, 51 bp, Artificial Sequence
  Description of Artificial Sequence: Synthetic oligonucleotide
  Description of Combined DNA/RNA Molecule: Synthetic oligonucleotide
tacagatacggacgggaatcaacacacatcaagagcaccctgttcactcgt

SEQ ID NO: 6204 - DNA, 57 bp, Artificial Sequence
  Description of Artificial Sequence: Synthetic oligonucleotide
ctcaccccagacagatgcccagttattcattaccattgtttacatcctcctgcgtca

SEQ ID NO: 6205 - DNA, 28 bp, Artificial Sequence
  Description of Artificial Sequence: Synthetic probe
ttctgttcactcaccccagacagatgcc

SEQ ID NO: 6206 - DNA, 22 bp, Artificial Sequence
  Description of Artificial Sequence: Synthetic primer
tacagatacggacgggaatcaa

SEQ ID NO: 6207 - DNA, 22 bp, Artificial Sequence
  Description of Artificial Sequence: Synthetic primer
tgacgcaggaggatgtaaacaa

SEQ ID NO: 6208 - DNA, 59 bp, Artificial Sequence
  Description of Artificial Sequence: Synthetic primer
  Description of Combined DNA/RNA Molecule: Synthetic primer
tgacgcaggaggatgtaaacaactttcctctaggccttgtggtaatgaataattgggcg

SEQ ID NO: 6209 - DNA, 39 bp, Artificial Sequence
  Description of Artificial Sequence: Synthetic primer
  Description of Combined DNA/RNA Molecule: Synthetic primer
acgacgacgacgaacctgagcccacagagccacaucaga

SEQ ID NO: 6210 - DNA, 39 bp, Artificial Sequence
  Description of Artificial Sequence: Synthetic primer
  Description of Combined DNA/RNA Molecule: Synthetic primer
acgacgacgacgaacccacagagccacatcaggcccccg

SEQ ID NO: 6211 - DNA, 54 bp, Artificial Sequence
  Description of Artificial Sequence: Synthetic primer
  Description of Combined DNA/RNA Molecule: Synthetic primer
acgacgacgacttgacgaacataattgtccttctgttgtggatgcctgcutgga

SEQ ID NO: 6212 - DNA, 45 bp, Artificial Sequence
  Description of Artificial Sequence: Synthetic oligonucleotide
  Description of Combined DNA/RNA Molecule: Synthetic oligonucleotide
ttcagcagcctggcatcacgctcccccagatcccaccgcacactg

SEQ ID NO: 6213 - DNA, 40 bp, Artificial Sequence
  Description of Artificial Sequence: Synthetic oligonucleotide
caccaggcccctccacccagcgtggagcgctaaggttgca

SEQ ID NO: 6214 - DNA, 20 bp, Artificial Sequence
  Description of Artificial Sequence: Synthetic probe
ttcaccgcacaccaggcccc

SEQ ID NO: 6215 - DNA, 19 bp, Artificial Sequence
  Description of Artificial Sequence: Synthetic primer
ttcagcagcctggcatcac

SEQ ID NO: 6216 - DNA, 19 bp, Artificial Sequence
  Description of Artificial Sequence: Synthetic primer
tgcaaccttagcgctccac

SEQ ID NO: 6217 - DNA, 43 bp, Artificial Sequence
  Description of Artificial Sequence: Synthetic primer
  Description of Combined DNA/RNA Molecule: Synthetic primer
tgcaaccttagcgctccaccttgggccacttgctggatggaga

SEQ ID NO: 6218 - DNA, 39 bp, Artificial Sequence
  Description of Artificial Sequence: Synthetic primer
  Description of Combined DNA/RNA Molecule: Synthetic primer
acgacgacgacgaagggtcccagctcagtgctcaagctg

SEQ ID NO: 6219 - DNA, 42 bp, Artificial Sequence
  Description of Artificial Sequence: Synthetic primer
  Description of Combined DNA/RNA Molecule: Synthetic primer
acgacgacgacgaatcccagctcagtgctcaagctacuggaa

SEQ ID NO: 6220 - DNA, 51 bp, Artificial Sequence
  Description of Artificial Sequence: Synthetic primer
  Description of Combined DNA/RNA Molecule: Synthetic primer
acgacgacgacttgacgaacataatctggtgctgccagtgctttgaggata

SEQ ID NO: 6221 - DNA, 46 bp, Artificial Sequence
  Description of Artificial Sequence: Synthetic oligonucleotide
  Description of Combined DNA/RNA Molecule: Synthetic oligonucleotide
tatcgcatcaaatggagagcaagcctgcccacacctgcgcactcct

SEQ ID NO: 6222 - DNA, 53 bp, Artificial Sequence
  Description of Artificial Sequence: Synthetic oligonucleotide
ctctcagcctgcacctagccagtttgtcacattgaccgctgttatacgttgca

SEQ ID NO: 6223 - DNA, 23 bp, Artificial Sequence
  Description of Artificial Sequence: Synthetic probe
ttctgcgcactctcagcctgcac

SEQ ID NO: 6224 - DNA, 22 bp, Artificial Sequence
  Description of Artificial Sequence: Synthetic primer
tatcgcatcaaatggagagcaa

SEQ ID NO: 6225 - DNA, 22 bp, Artificial Sequence
  Description of Artificial Sequence: Synthetic primer
tgcaacgtataacagcggtcaa

SEQ ID NO: 6226 - DNA, 51 bp, Artificial Sequence
  Description of Artificial Sequence: Synthetic primer
  Description of Combined DNA/RNA Molecule: Synthetic primer
tgcaacgtataacagcggtcaagccagtgctttgaggatggtgtatgacag

SEQ ID NO: 6227 - DNA, 41 bp, Artificial Sequence
  Description of Artificial Sequence: Synthetic primer
  Description of Combined DNA/RNA Molecule: Synthetic primer
acgacgacgacgaacacctagcagtgctgagacccacctga

SEQ ID NO: 6228 - DNA, 41 bp, Artificial Sequence
  Description of Artificial Sequence: Synthetic primer
  Description of Combined DNA/RNA Molecule: Synthetic primer
acgacgacgacgaacctagcagtgctgagacccaccugggt

SEQ ID NO: 6229 - DNA, 51 bp, Artificial Sequence
  Description of Artificial Sequence: Synthetic primer
  Description of Combined DNA/RNA Molecule: Synthetic primer
acgacgacgacttgacgaacataatggtgtctggtgaagctgaggaatcta

SEQ ID NO: 6230 - DNA, 56 bp, Artificial Sequence
  Description of Artificial Sequence: Synthetic oligonucleotide
  Description of Combined DNA/RNA Molecule: Synthetic oligonucleotide
tcctagtacctacagtgggcaagcacagagcagtacaggtacagagaagcaccaag

SEQ ID NO: 6231 - DNA, 51 bp, Artificial Sequence
  Description of Artificial Sequence: Synthetic oligonucleotide
ccagactcagtgaaaccagccttgcctccttgaccgctgttatacgttgca

SEQ ID NO: 6232 - DNA, 29 bp, Artificial Sequence
  Description of Artificial Sequence: Synthetic probe
ttagaagcaccagactcagtgaaaccagc

SEQ ID NO: 6233 - DNA, 22 bp, Artificial Sequence
  Description of Artificial Sequence: Synthetic primer
tcctagtacctacagtgggcaa

SEQ ID NO: 6234 - DNA, 22 bp, Artificial Sequence
  Description of Artificial Sequence: Synthetic primer
tgcaacgtataacagcggtcaa

SEQ ID NO: 6235 - DNA, 51 bp, Artificial Sequence
  Description of Artificial Sequence: Synthetic primer
  Description of Combined DNA/RNA Molecule: Synthetic primer
tgcaacgtataacagcggtcaagtgtctggtgaagctgaggaatttgctga

SEQ ID NO: 6236 - DNA, 43 bp, Artificial Sequence
  Description of Artificial Sequence: Synthetic primer
  Description of Combined DNA/RNA Molecule: Synthetic primer
acgacgacgacgaacaaaacctggttccagaaccagcagacag

SEQ ID NO: 6237 - DNA, 42 bp, Artificial Sequence
  Description of Artificial Sequence: Synthetic primer
  Description of Combined DNA/RNA Molecule: Synthetic primer
acgacgacgacgaacctggttccagaaccagcagacaaagta

SEQ ID NO: 6238 - DNA, 56 bp, Artificial Sequence
  Description of Artificial Sequence: Synthetic primer
  Description of Combined DNA/RNA Molecule: Synthetic primer
acgacgacgacttgacgaacataatccatgagaggccaatgaactgagagcugccc

SEQ ID NO: 6239 - DNA, 47 bp, Artificial Sequence
  Description of Artificial Sequence: Synthetic oligonucleotide
  Description of Combined DNA/RNA Molecule: Synthetic oligonucleotide
tagtttgtcgaaagtcccacacggaggtgagcaagcaggacaggctg

SEQ ID NO: 6240 - DNA, 42 bp, Artificial Sequence
  Description of Artificial Sequence: Synthetic oligonucleotide
ggccagccacccacaagcagcgtgcaaaattcaggctgtgca

SEQ ID NO: 6241 - DNA, 21 bp, Artificial Sequence
  Description of Artificial Sequence: Synthetic probe
ttcaggacaggccagccaccc

SEQ ID NO: 6242 - DNA, 22 bp, Artificial Sequence
  Description of Artificial Sequence: Synthetic primer
tagtttgtcgaaagtcccacac

SEQ ID NO: 6243 - DNA, 21 bp, Artificial Sequence
  Description of Artificial Sequence: Synthetic primer
tgcacagcctgaattttgcac

SEQ ID NO: 6244 - DNA, 48 bp, Artificial Sequence
  Description of Artificial Sequence: Synthetic primer
  Description of Combined DNA/RNA Molecule: Synthetic primer
tgcacagcctgaattttgcacgctgcctgagactgtgctgcctgtgga

SEQ ID NO: 6245 - DNA, 37 bp, Artificial Sequence
  Description of Artificial Sequence: Synthetic primer
  Description of Combined DNA/RNA Molecule: Synthetic primer
acgacgacgacgaagacccccaggaggctccaaaccg

SEQ ID NO: 6246 - DNA, 38 bp, Artificial Sequence
  Description of Artificial Sequence: Synthetic primer
  Description of Combined DNA/RNA Molecule: Synthetic primer
acgacgacgacgaaacccccaggaggctccaaaccatt

SEQ ID NO: 6247 - DNA, 59 bp, Artificial Sequence
  Description of Artificial Sequence: Synthetic primer
  Description of Combined DNA/RNA Molecule: Synthetic primer
acgacgacgacttgacgaacataataactttcagtacctgagaatggatgcagagctgc

SEQ ID NO: 6248 - DNA, 48 bp, Artificial Sequence
  Description of Artificial Sequence: Synthetic oligonucleotide
  Description of Combined DNA/RNA Molecule: Synthetic oligonucleotide
tagacacgagcgaggtcacccatccagctttctgtcaccatcaccatt

SEQ ID NO: 6249 - DNA, 50 bp, Artificial Sequence
  Description of Artificial Sequence: Synthetic oligonucleotide
ccaccaccagcattgtgaacctctgacccgtgcaaaattcaggctgtgca

SEQ ID NO: 6250 - DNA, 28 bp, Artificial Sequence
  Description of Artificial Sequence: Synthetic probe
aaaccatcaccaccaccagcattgtgaa

SEQ ID NO: 6251 - DNA, 19 bp, Artificial Sequence
  Description of Artificial Sequence: Synthetic primer
tagacacgagcgaggtcac

SEQ ID NO: 6252 - DNA, 21 bp, Artificial Sequence
  Description of Artificial Sequence: Synthetic primer
tgcacagcctgaattttgcac

SEQ ID NO: 6253 - DNA, 52 bp, Artificial Sequence
  Description of Artificial Sequence: Synthetic primer
  Description of Combined DNA/RNA Molecule: Synthetic primer
tgcacagcctgaattttgcacgtacctgagaatggatgcagagctatgagga

SEQ ID NO: 6254 - DNA, 54 bp, Artificial Sequence; identical to SEQ ID NO: 5808
  Description of Artificial Sequence: Synthetic primer
  Description of Combined DNA/RNA Molecule: Synthetic primer

SEQ ID NO: 6255 - DNA, 63 bp, Artificial Sequence
  Description of Artificial Sequence: Synthetic primer
  Description of Combined DNA/RNA Molecule: Synthetic primer
acgacgacgacgaacaaagaatatatacatttcagagaccaaattcaaaatgaaaaaccaggt

SEQ ID NO: 6256 - DNA, 54 bp, Artificial Sequence
  Description of Artificial Sequence: Synthetic primer
  Description of Combined DNA/RNA Molecule: Synthetic primer
acgacgacgacttgacgaacataatgaggctgatggatccctggtgtcagtgcc

SEQ ID NO: 6257 - DNA, 45 bp, Artificial Sequence
  Description of Artificial Sequence: Synthetic oligonucleotide
  Description of Combined DNA/RNA Molecule: Synthetic oligonucleotide
ttcttcacagtaccgccacaccacacagagcctctggacaccatc

SEQ ID NO: 6258 - DNA, 45 bp, Artificial Sequence
  Description of Artificial Sequence: Synthetic oligonucleotide
ccactgtcagccagtgcagagcaagctgtgttgtctggtggtgca

SEQ ID NO: 6259 - DNA, 26 bp, Artificial Sequence
  Description of Artificial Sequence: Synthetic probe
aactggacaccactgtcagccagtgc

SEQ ID NO: 6260 - DNA, 20 bp, Artificial Sequence
  Description of Artificial Sequence: Synthetic primer
ttcttcacagtaccgccaca

SEQ ID NO: 6261 - DNA, 19 bp, Artificial Sequence
  Description of Artificial Sequence: Synthetic primer
tgcaccaccagacaacaca

SEQ ID NO: 6262 - DNA, 47 bp, Artificial Sequence
  Description of Artificial Sequence: Synthetic primer
  Description of Combined DNA/RNA Molecule: Synthetic primer
tgcaccaccagacaacacagctgatggatccctggtgtcaatgctta

SEQ ID NO: 6263 - DNA, 44 bp, Artificial Sequence
  Description of Artificial Sequence: Synthetic primer
  Description of Combined DNA/RNA Molecule: Synthetic primer
acgacgacgacgaaccttttggccaagagtttagccacaucctg

SEQ ID NO: 6264 - DNA, 43 bp, Artificial Sequence
  Description of Artificial Sequence: Synthetic primer
  Description of Combined DNA/RNA Molecule: Synthetic primer
acgacgacgacgaaccacatgagtaccaccttttggccaagaa

SEQ ID NO: 6265 - DNA, 48 bp, Artificial Sequence
  Description of Artificial Sequence: Synthetic primer
  Description of Combined DNA/RNA Molecule: Synthetic primer
acgacgacgacttgacgaacataatccctgggtccctggtgcaugtga

SEQ ID NO: 6266 - DNA, 46 bp, Artificial Sequence
  Description of Artificial Sequence: Synthetic oligonucleotide
  Description of Combined DNA/RNA Molecule: Synthetic oligonucleotide
taccctcctagctccgtacagcagggacagtcagggtcgcagcctt

SEQ ID NO: 6267 - DNA, 41 bp, Artificial Sequence
  Description of Artificial Sequence: Synthetic oligonucleotide
gccccaggcagggctctgaagttgtgttgtctggtggtgca

SEQ ID NO: 6268 - DNA, 20 bp, Artificial Sequence
  Description of Artificial Sequence: Synthetic probe
ttggtcgcagccccaggcag

SEQ ID NO: 6269 - DNA, 20 bp, Artificial Sequence
  Description of Artificial Sequence: Synthetic primer
taccctcctagctccgtaca

SEQ ID NO: 6270 - DNA, 19 bp, Artificial Sequence
  Description of Artificial Sequence: Synthetic primer
tgcaccaccagacaacaca

SEQ ID NO: 6271 - DNA, 44 bp, Artificial Sequence
  Description of Artificial Sequence: Synthetic primer
  Description of Combined DNA/RNA Molecule: Synthetic primer
tgcaccaccagacaacacacctgggtccctggtgcatatggcat

SEQ ID NO: 6272 - DNA, 40 bp, Artificial Sequence
  Description of Artificial Sequence: Synthetic primer
  Description of Combined DNA/RNA Molecule: Synthetic primer
acgacgacgacgaactgacttgccagggccactcaccctt

SEQ ID NO: 6273 - DNA, 42 bp, Artificial Sequence
  Description of Artificial Sequence: Synthetic primer
  Description of Combined DNA/RNA Molecule: Synthetic primer
acgacgacgacgaagtggcttccattgcactggatgcugacc

SEQ ID NO: 6274 - DNA, 48 bp, Artificial Sequence
  Description of Artificial Sequence: Synthetic primer
  Description of Combined DNA/RNA Molecule: Synthetic primer
acgacgacgacttgacgaacataatgtgcccccacctgctccccatgt

SEQ ID NO: 6275 - DNA, 46 bp, Artificial Sequence
  Description of Artificial Sequence: Synthetic oligonucleotide
  Description of Combined DNA/RNA Molecule: Synthetic oligonucleotide
tcatcgccctcagatcttccacctcctgcatgtcctgctcacccgt

SEQ ID NO: 6276 - DNA, 48 bp, Artificial Sequence
  Description of Artificial Sequence: Synthetic oligonucleotide
cccaccattcagttcagcatcctgaggtggaggatagattggagggca

SEQ ID NO: 6277 - DNA, 29 bp, Artificial Sequence
  Description of Artificial Sequence: Synthetic probe
aactgctcacccaccattcagttcagcat

SEQ ID NO: 6278 - DNA, 21 bp, Artificial Sequence
  Description of Artificial Sequence: Synthetic primer
tcatcgccctcagatcttcca

SEQ ID NO: 6279 - DNA, 21 bp, Artificial Sequence
  Description of Artificial Sequence: Synthetic primer
tgccctccaatctatcctcca

SEQ ID NO: 6280 - DNA, 45 bp, Artificial Sequence
  Description of Artificial Sequence: Synthetic primer
  Description of Combined DNA/RNA Molecule: Synthetic primer
tgccctccaatctatcctccagctcccccagcctgtggctgccct

SEQ ID NO: 6281 - DNA, 44 bp, Artificial Sequence
  Description of Artificial Sequence: Synthetic primer
  Description of Combined DNA/RNA Molecule: Synthetic primer
acgacgacgacgaagcatgagttcacttgctgcacttcaaggcg

SEQ ID NO: 6282 - DNA, 46 bp, Artificial Sequence
  Description of Artificial Sequence: Synthetic primer
  Description of Combined DNA/RNA Molecule: Synthetic primer
acgacgacgacgaacagcaaaagtggcatgagttcacttgcugcat

SEQ ID NO: 6283 - DNA, 47 bp, Artificial Sequence
  Description of Artificial Sequence: Synthetic primer
  Description of Combined DNA/RNA Molecule: Synthetic primer
acgacgacgacttgacgaacataatgccctggccctgttggccaccg

SEQ ID NO: 6284 - DNA, 45 bp, Artificial Sequence
  Description of Artificial Sequence: Synthetic oligonucleotide
  Description of Combined DNA/RNA Molecule: Synthetic oligonucleotide
taaccagttaccaccgccaggctgaggaaggccaagggcagggtg

SEQ ID NO: 6285 - DNA, 46 bp, Artificial Sequence
  Description of Artificial Sequence: Synthetic oligonucleotide
gggcagcaccacatcacaccactggtggaggatagattggagggca

SEQ ID NO: 6286 - DNA, 21 bp, Artificial Sequence
  Description of Artificial Sequence: Synthetic probe
ttaagggcagggcagcaccac

SEQ ID NO: 6287 - DNA, 19 bp, Artificial Sequence
  Description of Artificial Sequence: Synthetic primer
taaccagttaccaccgcca

SEQ ID NO: 6288 - DNA, 21 bp, Artificial Sequence
  Description of Artificial Sequence: Synthetic primer
tgccctccaatctatcctcca

SEQ ID NO: 6289 - DNA, 47 bp, Artificial Sequence
  Description of Artificial Sequence: Synthetic primer
  Description of Combined DNA/RNA Molecule: Synthetic primer
tgccctccaatctatcctccacctgttggccaccagtggtatgatgc

SEQ ID NO: 6290 - DNA, 46 bp, Artificial Sequence
  Description of Artificial Sequence: Synthetic primer
  Description of Combined DNA/RNA Molecule: Synthetic primer
acgacgacgacgaaccagttcttctttcctattggacagcagtccg

SEQ ID NO: 6291 - DNA, 48 bp, Artificial Sequence
  Description of Artificial Sequence: Synthetic primer
  Description of Combined DNA/RNA Molecule: Synthetic primer
acgacgacgacgaaagttcttctttcctattggacagcagtccaaccg

SEQ ID NO: 6292 - DNA, 56 bp, Artificial Sequence
  Description of Artificial Sequence: Synthetic primer
  Description of Combined DNA/RNA Molecule: Synthetic primer
acgacgacgacttgacgaacataatctttagctacctccagatctgctgcagacat

SEQ ID NO: 6293 - DNA, 49 bp, Artificial Sequence
  Description of Artificial Sequence: Synthetic oligonucleotide
  Description of Combined DNA/RNA Molecule: Synthetic oligonucleotide
ttgcacgttgtcctgcaccccaatcccaaggcatatccaccgcacactg

SEQ ID NO: 6294 - DNA, 51 bp, Artificial Sequence
  Description of Artificial Sequence: Synthetic oligonucleotide
caccagagctgaggttgcacatctttgttcaggtagtttcccatgacggca

SEQ ID NO: 6295 - DNA, 25 bp, Artificial Sequence
  Description of Artificial Sequence: Synthetic probe
aacaccgcacaccagagctgaggtt

SEQ ID NO: 6296 - DNA, 19 bp, Artificial Sequence
  Description of Artificial Sequence: Synthetic primer
ttgcacgttgtcctgcacc

SEQ ID NO: 6297 - DNA, 20 bp, Artificial Sequence
  Description of Artificial Sequence: Synthetic primer
tgccgtcatgggaaactacc

SEQ ID NO: 6298 - DNA, 59 bp, Artificial Sequence
  Description of Artificial Sequence: Synthetic primer
  Description of Combined DNA/RNA Molecule: Synthetic primer
tgccgtcatgggaaactaccccaggtttaaaacaaaggctttgaacaaagatatgcaat

SEQ ID NO: 6299 - DNA, 41 bp, Artificial Sequence
  Description of Artificial Sequence: Synthetic primer
  Description of Combined DNA/RNA Molecule: Synthetic primer
acgacgacgacgaagacaccagcacacaggtctccacttga

SEQ ID NO: 6300 - DNA, 41 bp, Artificial Sequence
  Description of Artificial Sequence: Synthetic primer
  Description of Combined DNA/RNA Molecule: Synthetic primer
acgacgacgacgaaggtggacaccagcacacaggtcuccat

SEQ ID NO: 6301 - DNA, 58 bp, Artificial Sequence
  Description of Artificial Sequence: Synthetic primer
  Description of Combined DNA/RNA Molecule: Synthetic primer
acgacgacgacttgacgaacataattgtgactgtgggaagggtgaaattactcctgag

SEQ ID NO: 6302 - DNA, 47 bp, Artificial Sequence
  Description of Artificial Sequence: Synthetic oligonucleotide
  Description of Combined DNA/RNA Molecule: Synthetic oligonucleotide
tgcttacccacgatgcacccccctagggacacccttttctcagcact

SEQ ID NO: 6303 - DNA, 56 bp, Artificial Sequence
  Description of Artificial Sequence: Synthetic oligonucleotide
gcatccccaagagacacctccagatttgaaaatcaaggtcgtatgacttgctcgca

SEQ ID NO: 6304 - DNA, 30 bp, Artificial Sequence
  Description of Artificial Sequence: Synthetic probe
aatttctcagcatccccaagagacacctcc

SEQ ID NO: 6305 - DNA, 19 bp, Artificial Sequence
  Description of Artificial Sequence: Synthetic primer
tgcttacccacgatgcacc

SEQ ID NO: 6306 - DNA, 20 bp, Artificial Sequence
  Description of Artificial Sequence: Synthetic primer
tgcgagcaagtcatacgacc

SEQ ID NO: 6307 - DNA, 51 bp, Artificial Sequence
  Description of Artificial Sequence: Synthetic primer
  Description of Combined DNA/RNA Molecule: Synthetic primer
tgcgagcaagtcatacgaccactgtgggaagggtgaaattactcttgaagt

SEQ ID NO: 6308 - DNA, 43 bp, Artificial Sequence
  Description of Artificial Sequence: Synthetic primer
  Description of Combined DNA/RNA Molecule: Synthetic primer
acgacgacgacgaaggaagggagagatgggactcagcaccaaa

SEQ ID NO: 6309 - DNA, 37 bp, Artificial Sequence
  Description of Artificial Sequence: Synthetic primer
  Description of Combined DNA/RNA Molecule: Synthetic primer
acgacgacgacgaaggccagggagagggtgaggaggg

SEQ ID NO: 6310 - DNA, 50 bp, Artificial Sequence
  Description of Artificial Sequence: Synthetic primer
  Description of Combined DNA/RNA Molecule: Synthetic primer
acgacgacgacttgacgaacataatgctcagtggcaggttggtgcctgga

SEQ ID NO: 6311 - DNA, 45 bp, Artificial Sequence
  Description of Artificial Sequence: Synthetic oligonucleotide
  Description of Combined DNA/RNA Molecule: Synthetic oligonucleotide
tagccgatggcgtaaaaccccaaggacagcatctgggtcaugact

SEQ ID NO: 6312 - DNA, 47 bp, Artificial Sequence
  Description of Artificial Sequence: Synthetic oligonucleotide
tgatcatctcacaccagcagtgctgggggtcgtatgacttgctcgca

SEQ ID NO: 6313 - DNA, 29 bp, Artificial Sequence
  Description of Artificial Sequence: Synthetic probe
aatgggtcatgatcatctcacaccagcag

SEQ ID NO: 6314 - DNA, 19 bp, Artificial Sequence
  Description of Artificial Sequence: Synthetic primer
tagccgatggcgtaaaacc

SEQ ID NO: 6315 - DNA, 20 bp, Artificial Sequence
  Description of Artificial Sequence: Synthetic primer
tgcgagcaagtcatacgacc

SEQ ID NO: 6316 - DNA, 46 bp, Artificial Sequence
  Description of Artificial Sequence: Synthetic primer
  Description of Combined DNA/RNA Molecule: Synthetic primer
tgcgagcaagtcatacgaccctcagtggcaggttggtgcttgggag

SEQ ID NO: 6317 - DNA, 44 bp, Artificial Sequence
  Description of Artificial Sequence: Synthetic primer
  Description of Combined DNA/RNA Molecule: Synthetic primer
acgacgacgacgaaggcctcatctatgaggagacccacagagta

SEQ ID NO: 6318 - DNA, 43 bp, Artificial Sequence
  Description of Artificial Sequence: Synthetic primer
  Description of Combined DNA/RNA Molecule: Synthetic primer
acgacgacgacgaagcatgaagcacatttctggcctcauctac

SEQ ID NO: 6319 - DNA, 55 bp, Artificial Sequence
  Description of Artificial Sequence: Synthetic primer
  Description of Combined DNA/RNA Molecule: Synthetic primer
acgacgacgacttgacgaacataatgaccatgtccatggtggtgactgtcutgta

SEQ ID NO: 6320 - DNA, 51 bp, Artificial Sequence
  Description of Artificial Sequence: Synthetic oligonucleotide
  Description of Combined DNA/RNA Molecule: Synthetic oligonucleotide
ttacaggccgcatagcaacgaaggtgttcctggagaacatgattcaggatg

SEQ ID NO: 6321 - DNA, 49 bp, Artificial Sequence
  Description of Artificial Sequence: Synthetic oligonucleotide
ggacaccatgacctacacagagcacaccaagttgagacatgggctcgca

SEQ ID NO: 6322 - DNA, 31 bp, Artificial Sequence
  Description of Artificial Sequence: Synthetic probe
tttgattcaggacaccatgacctacacagag

SEQ ID NO: 6323 - DNA, 19 bp, Artificial Sequence
  Description of Artificial Sequence: Synthetic primer
ttacaggccgcatagcaac

SEQ ID NO: 6324 - DNA, 19 bp, Artificial Sequence
  Description of Artificial Sequence: Synthetic primer
tgcgagcccatgtctcaac

SEQ ID NO: 6325 - DNA, 48 bp, Artificial Sequence
  Description of Artificial Sequence: Synthetic primer
  Description of Combined DNA/RNA Molecule: Synthetic primer
tgcgagcccatgtctcaacggtggtgactgtcttgtgcttgatgtgcc

SEQ ID NO: 6326 - DNA, 40 bp, Artificial Sequence
  Description of Artificial Sequence: Synthetic primer
  Description of Combined DNA/RNA Molecule: Synthetic primer
acgacgacgacgaagatccacccacctcagcctcacaaaa

SEQ ID NO: 6327 - DNA, 41 bp, Artificial Sequence
  Description of Artificial Sequence: Synthetic primer
  Description of Combined DNA/RNA Molecule: Synthetic primer
acgacgacgacgaaccacccacctcagcctcacaaagtgcc

SEQ ID NO: 6328 - DNA, 50 bp, Artificial Sequence
  Description of Artificial Sequence: Synthetic primer
  Description of Combined DNA/RNA Molecule: Synthetic primer
acgacgacgacttgacgaacataatccaggctcccactgtgggaagcaga

SEQ ID NO: 6329 - DNA, 44 bp, Artificial Sequence
  Description of Artificial Sequence: Synthetic oligonucleotide
  Description of Combined DNA/RNA Molecule: Synthetic oligonucleotide
ttcgcctaccgcagtgaacggcatgagccaccacactcagcaga

SEQ ID NO: 6330 - DNA, 53 bp, Artificial Sequence
  Description of Artificial Sequence: Synthetic oligonucleotide
gcaagcactgatatttttaagagctcccagggccgttgagacatgggctcgca

SEQ ID NO: 6331 - DNA, 36 bp, Artificial Sequence
  Description of Artificial Sequence: Synthetic probe
ttacactcagcaagcactgatatttttaagagctcc

SEQ ID NO: 6332 - DNA, 19 bp, Artificial Sequence
  Description of Artificial Sequence: Synthetic primer
ttcgcctaccgcagtgaac

SEQ ID NO: 6333 - DNA, 19 bp, Artificial Sequence
  Description of Artificial Sequence: Synthetic primer
tgcgagcccatgtctcaac

SEQ ID NO: 6334 - DNA, 41 bp, Artificial Sequence
  Description of Artificial Sequence: Synthetic primer
  Description of Combined DNA/RNA Molecule: Synthetic primer
tgcgagcccatgtctcaacctcctgagggtggccttgggaa

SEQ ID NO: 6335 - DNA, 39 bp, Artificial Sequence
  Description of Artificial Sequence: Synthetic primer
  Description of Combined DNA/RNA Molecule: Synthetic primer
acgacgacgacgaaagcacacacagtgcctcccaagggt

SEQ ID NO: 6336 - DNA, 39 bp, Artificial Sequence
  Description of Artificial Sequence: Synthetic primer
  Description of Combined DNA/RNA Molecule: Synthetic primer
acgacgacgacgaacacagtgcctcccaagggcagggaa

SEQ ID NO: 6337 - DNA, 50 bp, Artificial Sequence
  Description of Artificial Sequence: Synthetic primer
  Description of Combined DNA/RNA Molecule: Synthetic primer
acgacgacgacttgacgaacataatgtgctctgtccctgtgggccaggaa

SEQ ID NO: 6338 - DNA, 59 bp, Artificial Sequence
  Description of Artificial Sequence: Synthetic oligonucleotide
  Description of Combined DNA/RNA Molecule: Synthetic oligonucleotide
ttgcatttcgttagcgacacagggaagactatgaaacatcctaactaatgcgcauacca

SEQ ID NO: 6339 - DNA, 58 bp, Artificial Sequence
  Description of Artificial Sequence: Synthetic oligonucleotide
tactgaatgcacattcacatggtcagttaccaatgtgctgtgagtcgatctacccgca

SEQ ID NO: 6340 - DNA, 31 bp, Artificial Sequence
  Description of Artificial Sequence: Synthetic probe
ccatgcgcatactgaatgcacattcacatgg

SEQ ID NO: 6341 - DNA, 21 bp, Artificial Sequence
  Description of Artificial Sequence: Synthetic primer
ttgcatttcgttagcgacaca

SEQ ID NO: 6342 - DNA, 20 bp, Artificial Sequence
  Description of Artificial Sequence: Synthetic primer
tgcgggtagatcgactcaca

SEQ ID NO: 6343 - DNA, 49 bp, Artificial Sequence
  Description of Artificial Sequence: Synthetic primer
  Description of Combined DNA/RNA Molecule: Synthetic primer
tgcgggtagatcgactcacaggccaggagagagagaagcacactggtag

SEQ ID NO: 6344 - DNA, 39 bp, Artificial Sequence
  Description of Artificial Sequence: Synthetic primer
  Description of Combined DNA/RNA Molecule: Synthetic primer
acgacgacgacgaagctggcctgcagaggcaacagagat

SEQ ID NO: 6345 - DNA, 42 bp, Artificial Sequence
  Description of Artificial Sequence: Synthetic primer
  Description of Combined DNA/RNA Molecule: Synthetic primer
acgacgacgacgaacattgctcaagctggcctgcagaggcag

SEQ ID NO: 6346 - DNA, 55 bp, Artificial Sequence
  Description of Artificial Sequence: Synthetic primer
  Description of Combined DNA/RNA Molecule: Synthetic primer
acgacgacgacttgacgaacataatcactgtaggaggccaggatgatggcaaaga

SEQ ID NO: 6347 - DNA, 57 bp, Artificial Sequence
  Description of Artificial Sequence: Synthetic oligonucleotide
  Description of Combined DNA/RNA Molecule: Synthetic oligonucleotide
tctcatgggcgctagtatcaacgagacactaccaagaaccagatgttcatcacccgt

SEQ ID NO: 6348 - DNA, 47 bp, Artificial Sequence
  Description of Artificial Sequence: Synthetic oligonucleotide
cccacatggtcatcctgctgctgccgtttccctgattgatacccgca

SEQ ID NO: 6349 - DNA, 28 bp, Artificial Sequence
  Description of Artificial Sequence: Synthetic probe
aattcatcacccacatggtcatcctgct

SEQ ID NO: 6350 - DNA, 22 bp, Artificial Sequence
  Description of Artificial Sequence: Synthetic primer
tctcatgggcgctagtatcaac

SEQ ID NO: 6351 - DNA, 22 bp, Artificial Sequence
  Description of Artificial Sequence: Synthetic primer
tgcgggtatcaatcagggaaac

SEQ ID NO: 6352 - DNA, 51 bp, Artificial Sequence
  Description of Artificial Sequence: Synthetic primer
  Description of Combined DNA/RNA Molecule: Synthetic primer
tgcgggtatcaatcagggaaactaggaggccaggatgatggcaagtggaca

SEQ ID NO: 6353 - DNA, 38 bp, Artificial Sequence
  Description of Artificial Sequence: Synthetic primer
  Description of Combined DNA/RNA Molecule: Synthetic primer
acgacgacgacgaaggtgagggcacctggagcacccaa

SEQ ID NO: 6354 - DNA, 39 bp, Artificial Sequence
  Description of Artificial Sequence: Synthetic primer
  Description of Combined DNA/RNA Molecule: Synthetic primer
acgacgacgacgaagcacacatggtgagggcaccuggaa

SEQ ID NO: 6355 - DNA, 66 bp, Artificial Sequence
  Description of Artificial Sequence: Synthetic primer
  Description of Combined DNA/RNA Molecule: Synthetic primer
acgacgacgacttgacgaacataatctaaaatatggaaatagattcctcttgggagtgtgagggaa

SEQ ID NO: 6356 - DNA, 46 bp, Artificial Sequence
  Description of Artificial Sequence: Synthetic oligonucleotide
  Description of Combined DNA/RNA Molecule: Synthetic oligonucleotide
tggatcgagacggaatgcaacgagagggccctccacacgcacactg

SEQ ID NO: 6357 - DNA, 45 bp, Artificial Sequence
  Description of Artificial Sequence: Synthetic oligonucleotide
caccagcaagtcccagggcctccgtttccctgattgatacccgca

SEQ ID NO: 6358 - DNA, 24 bp, Artificial Sequence
  Description of Artificial Sequence: Synthetic probe
ttacacgcacaccagcaagtccca

SEQ ID NO: 6359 - DNA, 21 bp, Artificial Sequence
  Description of Artificial Sequence: Synthetic primer
tggatcgagacggaatgcaac

SEQ ID NO: 6360 - DNA, 22 bp, Artificial Sequence
  Description of Artificial Sequence: Synthetic primer
tgcgggtatcaatcagggaaac

SEQ ID NO: 6361 - DNA, 50 bp, Artificial Sequence
  Description of Artificial Sequence: Synthetic primer
  Description of Combined DNA/RNA Molecule: Synthetic primer
acgacgacgacgaagcctagcaagatttcagccacatttcttacauttct

SEQ ID NO: 6362 - DNA, 44 bp, Artificial Sequence
  Description of Artificial Sequence: Synthetic primer
  Description of Combined DNA/RNA Molecule: Synthetic primer
acgacgacgacgaacacctggcctagcaagatttcagccacatc

SEQ ID NO: 6363 - DNA, 53 bp, Artificial Sequence
  Description of Artificial Sequence: Synthetic primer
  Description of Combined DNA/RNA Molecule: Synthetic primer
acgacgacgacttgacgaacataatcttgcaaagctggccttgtgctccttct

SEQ ID NO: 6364 - DNA, 48 bp, Artificial Sequence
  Description of Artificial Sequence: Synthetic oligonucleotide
  Description of Combined DNA/RNA Molecule: Synthetic oligonucleotide
ttgcaacaggctaccgaccccaccaaagctgtgaacacagacaaatat

SEQ ID NO: 6365 - DNA, 45 bp, Artificial Sequence
  Description of Artificial Sequence: Synthetic oligonucleotide
aatgcagtgctggtccccagcctgggtaggtaaggaagtcacgca

SEQ ID NO: 6366 - DNA, 27 bp, Artificial Sequence
  Description of Artificial Sequence: Synthetic probe
aaacagacaaatgcagtgctggtcccc

SEQ ID NO: 6367 - DNA, 19 bp, Artificial Sequence
  Description of Artificial Sequence: Synthetic primer
ttgcaacaggctaccgacc

SEQ ID NO: 6368 - DNA, 21 bp, Artificial Sequence
  Description of Artificial Sequence: Synthetic primer
tgcgtgacttccttacctacc

SEQ ID NO: 6369 - DNA, 48 bp, Artificial Sequence
  Description of Artificial Sequence: Synthetic primer
  Description of Combined DNA/RNA Molecule: Synthetic primer
tgcgtgacttccttacctaccctggccttgtgctccttcctatgccaa

SEQ ID NO: 6370 - DNA, 37 bp, Artificial Sequence; identical to SEQ ID NO: 299
  Description of Artificial Sequence: Synthetic primer
  Description of Combined DNA/RNA Molecule: Synthetic primer

SEQ ID NO: 6371 - DNA, 39 bp, Artificial Sequence
  Description of Artificial Sequence: Synthetic primer
  Description of Combined DNA/RNA Molecule: Synthetic primer
acgacgacgacgaaccctcctgccacagcaaggaagctt

SEQ ID NO: 6372 - DNA, 58 bp, Artificial Sequence
  Description of Artificial Sequence: Synthetic primer
  Description of Combined DNA/RNA Molecule: Synthetic primer
acgacgacgacttgacgaacataatgcaagtactatgctgttgggtgagtgtcuctgg

SEQ ID NO: 6373 - DNA, 53 bp, Artificial Sequence
  Description of Artificial Sequence: Synthetic oligonucleotide
  Description of Combined DNA/RNA Molecule: Synthetic oligonucleotide
taagcctgcttttccgaaacaactccataaaagccctgtcacaactcactcct

SEQ ID NO: 6374 - DNA, 48 bp, Artificial Sequence
  Description of Artificial Sequence: Synthetic oligonucleotide
ctctctgcaccccatccactggctctcttgtattgcgccaggatagca

SEQ ID NO: 6375 - DNA, 28 bp, Artificial Sequence
  Description of Artificial Sequence: Synthetic probe
ttcaactcactctctgcaccccatccac

SEQ ID NO: 6376 - DNA, 22 bp, Artificial Sequence
  Description of Artificial Sequence: Synthetic primer
taagcctgcttttccgaaacaa

SEQ ID NO: 6377 - DNA, 21 bp, Artificial Sequence
  Description of Artificial Sequence: Synthetic primer
tgctatcctggcgcaatacaa

SEQ ID NO: 6378 - DNA, 53 bp, Artificial Sequence
  Description of Artificial Sequence: Synthetic primer
  Description of Combined DNA/RNA Molecule: Synthetic primer
tgctatcctggcgcaatacaagtactatgctgttgggtgagtgtctttgagga

SEQ ID NO: 6379 - DNA, 45 bp, Artificial Sequence; identical to SEQ ID NO: 128
  Description of Artificial Sequence: Synthetic primer
  Description of Combined DNA/RNA Molecule: Synthetic primer

SEQ ID NO: 6380 - DNA, 42 bp, Artificial Sequence
  Description of Artificial Sequence: Synthetic primer
  Description of Combined DNA/RNA Molecule: Synthetic primer
acgacgacgacgaaccagcagccacatgttccagagcuacag

SEQ ID NO: 6381 - DNA, 52 bp, Artificial Sequence
  Description of Artificial Sequence: Synthetic primer
  Description of Combined DNA/RNA Molecule: Synthetic primer
acgacgacgacttgacgaacataatctcctcctcctggtgtgtgtgcugcta

SEQ ID NO: 6382 - DNA, 50 bp, Artificial Sequence
  Description of Artificial Sequence: Synthetic oligonucleotide
  Description of Combined DNA/RNA Molecule: Synthetic oligonucleotide
tcgacgaatctgctcagacaactgcagctggcaatggaactgccagcatg

SEQ ID NO: 6383 - DNA, 43 bp, Artificial Sequence
  Description of Artificial Sequence: Synthetic oligonucleotide
gcacaggagcaggaggagaggcagttgaagcagcgtctgagca

SEQ ID NO: 6384 - DNA, 24 bp, Artificial Sequence
  Description of Artificial Sequence: Synthetic probe
ttactgccagcacaggagcaggag

SEQ ID NO: 6385 - DNA, 21 bp, Artificial Sequence
  Description of Artificial Sequence: Synthetic primer
tcgacgaatctgctcagacaa

SEQ ID NO: 6386 - DNA, 19 bp, Artificial Sequence
  Description of Artificial Sequence: Synthetic primer
tgctcagacgctgcttcaa

SEQ ID NO: 6387 - DNA, 45 bp, Artificial Sequence
  Description of Artificial Sequence: Synthetic primer
  Description of Combined DNA/RNA Molecule: Synthetic primer
tgctcagacgctgcttcaacctcctggtgtgtgtgctgttgcctt

SEQ ID NO: 6388 - DNA, 43 bp, Artificial Sequence; identical to SEQ ID NO: 881
  Description of Artificial Sequence: Synthetic primer
  Description of Combined DNA/RNA Molecule: Synthetic primer

SEQ ID NO: 6389 - DNA, 41 bp, Artificial Sequence; identical to SEQ ID NO: 882
  Description of Artificial Sequence: Synthetic primer
  Description of Combined DNA/RNA Molecule: Synthetic primer

SEQ ID NO: 6390 - DNA, 51 bp, Artificial Sequence; identical to SEQ ID NO: 883
  Description of Artificial Sequence: Synthetic primer
  Description of Combined DNA/RNA Molecule: Synthetic primer

SEQ ID NO: 6391 - DNA, 47 bp, Artificial Sequence; identical to SEQ ID NO: 884
  Description of Artificial Sequence: Synthetic oligonucleotide
  Description of Combined DNA/RNA Molecule: Synthetic oligonucleotide

SEQ ID NO: 6392 - DNA, 42 bp, Artificial Sequence; identical to SEQ ID NO: 885
  Description of Artificial Sequence: Synthetic oligonucleotide

SEQ ID NO: 6393 - DNA, 22 bp, Artificial Sequence
  Description of Artificial Sequence: Synthetic probe
tttccctcagcccccaacacag

SEQ ID NO: 6394 - DNA, 20 bp, Artificial Sequence
  Description of Artificial Sequence: Synthetic primer
tagggcgacagttaccacaa

SEQ ID NO: 6395 - DNA, 20 bp, Artificial Sequence
  Description of Artificial Sequence: Synthetic primer
tatacgagcgagacccacaa

SEQ ID NO: 6396 - DNA, 46 bp, Artificial Sequence; identical to SEQ ID NO: 889
  Description of Artificial Sequence: Synthetic primer
  Description of Combined DNA/RNA Molecule: Synthetic primer

SEQ ID NO: 6397 - DNA, 43 bp, Artificial Sequence; identical to SEQ ID NO: 1110
  Description of Artificial Sequence: Synthetic primer
  Description of Combined DNA/RNA Molecule: Synthetic primer

SEQ ID NO: 6398 - DNA, 41 bp, Artificial Sequence; identical to SEQ ID NO: 1111
  Description of Artificial Sequence: Synthetic primer
  Description of Combined DNA/RNA Molecule: Synthetic primer

SEQ ID NO: 6399 - DNA, 52 bp, Artificial Sequence; identical to SEQ ID NO: 1112
  Description of Artificial Sequence: Synthetic primer
  Description of Combined DNA/RNA Molecule: Synthetic primer

SEQ ID NO: 6400 - DNA, 51 bp, Artificial Sequence; identical to SEQ ID NO: 1113
  Description of Artificial Sequence: Synthetic oligonucleotide
  Description of Combined DNA/RNA Molecule: Synthetic oligonucleotide

SEQ ID NO: 6401 - DNA, 54 bp, Artificial Sequence; identical to SEQ ID NO: 1114
  Description of Artificial Sequence: Synthetic oligonucleotide

SEQ ID NO: 6402 - DNA, 30 bp, Artificial Sequence; identical to SEQ ID NO: 1115
  Description of Artificial Sequence: Synthetic probe

SEQ ID NO: 6403 - DNA, 22 bp, Artificial Sequence
  Description of Artificial Sequence: Synthetic primer
tacgaatcacccgagagttcaa

SEQ ID NO: 6404 - DNA, 22 bp, Artificial Sequence
  Description of Artificial Sequence: Synthetic primer
tctgacctatacccacccacaa

SEQ ID NO: 6405 - DNA, 50 bp, Artificial Sequence; identical to SEQ ID NO: 1118
  Description of Artificial Sequence: Synthetic primer
  Description of Combined DNA/RNA Molecule: Synthetic primer

SEQ ID NO: 6406 - DNA, 37 bp, Artificial Sequence; identical to SEQ ID NO: 1128
  Description of Artificial Sequence: Synthetic primer
  Description of Combined DNA/RNA Molecule: Synthetic primer

SEQ ID NO: 6407 - DNA, 41 bp, Artificial Sequence; identical to SEQ ID NO: 1129
  Description of Artificial Sequence: Synthetic primer
  Description of Combined DNA/RNA Molecule: Synthetic primer

SEQ ID NO: 6408 - DNA, 55 bp, Artificial Sequence; identical to SEQ ID NO: 1130
  Description of Artificial Sequence: Synthetic primer
  Description of Combined DNA/RNA Molecule: Synthetic primer

SEQ ID NO: 6409 - DNA, 46 bp, Artificial Sequence; identical to SEQ ID NO: 1131
  Description of Artificial Sequence: Synthetic oligonucleotide
  Description of Combined DNA/RNA Molecule: Synthetic oligonucleotide

SEQ ID NO: 6410 - DNA, 51 bp, Artificial Sequence; identical to SEQ ID NO: 1132
  Description of Artificial Sequence: Synthetic oligonucleotide

SEQ ID NO: 6411 - DNA, 28 bp, Artificial Sequence
  Description of Artificial Sequence: Synthetic probe
ttgacaacagggctcactgtgccttcag

SEQ ID NO: 6412 - DNA, 21 bp, Artificial Sequence
  Description of Artificial Sequence: Synthetic primer
tctcataaacactccggccac

SEQ ID NO: 6413 - DNA, 20 bp, Artificial Sequence
  Description of Artificial Sequence: Synthetic primer
tctgcccgttattgagccac

SEQ ID NO: 6414 - DNA, 47 bp, Artificial Sequence; identical to SEQ ID NO: 1136
  Description of Artificial Sequence: Synthetic primer
  Description of Combined DNA/RNA Molecule: Synthetic primer

SEQ ID NO: 6415 - DNA, 36 bp, Artificial Sequence; identical to SEQ ID NO: 1595
  Description of Artificial Sequence: Synthetic primer
  Description of Combined DNA/RNA Molecule: Synthetic primer

SEQ ID NO: 6416 - DNA, 39 bp, Artificial Sequence; identical to SEQ ID NO: 1596
  Description of Artificial Sequence: Synthetic primer
  Description of Combined DNA/RNA Molecule: Synthetic primer

SEQ ID NO: 6417 - DNA, 54 bp, Artificial Sequence; identical to SEQ ID NO: 1597
  Description of Artificial Sequence: Synthetic primer
  Description of Combined DNA/RNA Molecule: Synthetic primer

SEQ ID NO: 6418 - DNA, 45 bp, Artificial Sequence; identical to SEQ ID NO: 1598
  Description of Artificial Sequence: Synthetic oligonucleotide
  Description of Combined DNA/RNA Molecule: Synthetic oligonucleotide

SEQ ID NO: 6419 - DNA, 52 bp, Artificial Sequence; identical to SEQ ID NO: 1599
  Description of Artificial Sequence: Synthetic oligonucleotide

SEQ ID NO: 6420 - DNA, 33 bp, Artificial Sequence; identical to SEQ ID NO: 1600
  Description of Artificial Sequence: Synthetic probe

SEQ ID NO: 6421 - DNA, 21 bp, Artificial Sequence
  Description of Artificial Sequence: Synthetic primer
tcacagagacttgccgatcac

SEQ ID NO: 6422 - DNA, 22 bp, Artificial Sequence
  Description of Artificial Sequence: Synthetic primer
tggccatgtctaagctacacac

SEQ ID NO: 6423 - DNA, 44 bp, Artificial Sequence; identical to SEQ ID NO: 1603
  Description of Artificial Sequence: Synthetic primer
  Description of Combined DNA/RNA Molecule: Synthetic primer

SEQ ID NO: 6424 - DNA, 38 bp, Artificial Sequence; identical to SEQ ID NO: 1781
  Description of Artificial Sequence: Synthetic primer
  Description of Combined DNA/RNA Molecule: Synthetic primer

SEQ ID NO: 6425 - DNA, 38 bp, Artificial Sequence; identical to SEQ ID NO: 1782
  Description of Artificial Sequence: Synthetic primer
  Description of Combined DNA/RNA Molecule: Synthetic primer

SEQ ID NO: 6426 - DNA, 48 bp, Artificial Sequence; identical to SEQ ID NO: 1783
  Description of Artificial Sequence: Synthetic primer
  Description of Combined DNA/RNA Molecule: Synthetic primer

SEQ ID NO: 6427 - DNA, 43 bp, Artificial Sequence; identical to SEQ ID NO: 1784
  Description of Artificial Sequence: Synthetic oligonucleotide
  Description of Combined DNA/RNA Molecule: Synthetic oligonucleotide

SEQ ID NO: 6428 - DNA, 45 bp, Artificial Sequence; identical to SEQ ID NO: 1785
  Description of Artificial Sequence: Synthetic oligonucleotide

SEQ ID NO: 6429 - DNA, 24 bp, Artificial Sequence
  Description of Artificial Sequence: Synthetic probe
ttggcctcaacccttccccaccac

SEQ ID NO: 6430 - DNA, 20 bp, Artificial Sequence
  Description of Artificial Sequence: Synthetic primer
tatagtcacgcaggaccaca

SEQ ID NO: 6431 - DNA, 21 bp, Artificial Sequence
  Description of Artificial Sequence: Synthetic primer
tgtcatagacagccgcaaaca

SEQ ID NO: 6432 - DNA, 46 bp, Artificial Sequence; identical to SEQ ID NO: 1789
  Description of Artificial Sequence: Synthetic primer
  Description of Combined DNA/RNA Molecule: Synthetic primer

SEQ ID NO: 6433 - DNA, 40 bp, Artificial Sequence; identical to SEQ ID NO: 1808
  Description of Artificial Sequence: Synthetic primer
  Description of Combined DNA/RNA Molecule: Synthetic primer

SEQ ID NO: 6434 - DNA, 38 bp, Artificial Sequence; identical to SEQ ID NO: 1809
  Description of Artificial Sequence: Synthetic primer
  Description of Combined DNA/RNA Molecule: Synthetic primer

SEQ ID NO: 6435 - DNA, 52 bp, Artificial Sequence; identical to SEQ ID NO: 1810
  Description of Artificial Sequence: Synthetic primer
  Description of Combined DNA/RNA Molecule: Synthetic primer

SEQ ID NO: 6436 - DNA, 47 bp, Artificial Sequence; identical to SEQ ID NO: 1811
  Description of Artificial Sequence: Synthetic oligonucleotide
  Description of Combined DNA/RNA Molecule: Synthetic oligonucleotide

SEQ ID NO: 6437 - DNA, 55 bp, Artificial Sequence; identical to SEQ ID NO: 1812
  Description of Artificial Sequence: Synthetic oligonucleotide

SEQ ID NO: 6438 - DNA, 35 bp, Artificial Sequence; identical to SEQ ID NO: 1813
  Description of Artificial Sequence: Synthetic probe

SEQ ID NO: 6439 - DNA, 19 bp, Artificial Sequence
  Description of Artificial Sequence: Synthetic primer
ttttccgcgtcagagcaca

SEQ ID NO: 6440 - DNA, 22 bp, Artificial Sequence
  Description of Artificial Sequence: Synthetic primer
tgtcgagctaggtccgataaca

SEQ ID NO: 6441 - DNA, 48 bp, Artificial Sequence; identical to SEQ ID NO: 1816
  Description of Artificial Sequence: Synthetic primer
  Description of Combined DNA/RNA Molecule: Synthetic primer

SEQ ID NO: 6442 - DNA, 40 bp, Artificial Sequence; identical to SEQ ID NO: 1826
  Description of Artificial Sequence: Synthetic primer
  Description of Combined DNA/RNA Molecule: Synthetic primer

SEQ ID NO: 6443 - DNA, 39 bp, Artificial Sequence; identical to SEQ ID NO: 1827
  Description of Artificial Sequence: Synthetic primer
  Description of Combined DNA/RNA Molecule: Synthetic primer

SEQ ID NO: 6444 - DNA, 52 bp, Artificial Sequence; identical to SEQ ID NO: 1828
  Description of Artificial Sequence: Synthetic primer
  Description of Combined DNA/RNA Molecule: Synthetic primer

SEQ ID NO: 6445 - DNA, 42 bp, Artificial Sequence; identical to SEQ ID NO: 1829
  Description of Artificial Sequence: Synthetic oligonucleotide
  Description of Combined DNA/RNA Molecule: Synthetic oligonucleotide

SEQ ID NO: 6446 - DNA, 43 bp, Artificial Sequence; identical to SEQ ID NO: 1830
  Description of Artificial Sequence: Synthetic oligonucleotide

SEQ ID NO: 6447 - DNA, 23 bp, Artificial Sequence
  Description of Artificial Sequence: Synthetic probe
aaggtgtcaggcagggctgcact

SEQ ID NO: 6448 - DNA, 19 bp, Artificial Sequence
  Description of Artificial Sequence: Synthetic primer
ttcgctgcccggttaaaca

SEQ ID NO: 6449 - DNA, 22 bp, Artificial Sequence
  Description of Artificial Sequence: Synthetic primer
tgtcgagctaggtccgataaca

SEQ ID NO: 6450 - DNA, 45 bp, Artificial Sequence; identical to SEQ ID NO: 1834
  Description of Artificial Sequence: Synthetic primer
  Description of Combined DNA/RNA Molecule: Synthetic primer

SEQ ID NO: 6451 - DNA, 48 bp, Artificial Sequence; identical to SEQ ID NO: 1943
  Description of Artificial Sequence: Synthetic primer
  Description of Combined DNA/RNA Molecule: Synthetic primer

SEQ ID NO: 6452 - DNA, 49 bp, Artificial Sequence; identical to SEQ ID NO: 1944
  Description of Artificial Sequence: Synthetic primer
  Description of Combined DNA/RNA Molecule: Synthetic primer

SEQ ID NO: 6453 - DNA, 53 bp, Artificial Sequence; identical to SEQ ID NO: 1945
  Description of Artificial Sequence: Synthetic primer
  Description of Combined DNA/RNA Molecule: Synthetic primer

SEQ ID NO: 6454 - DNA, 48 bp, Artificial Sequence; identical to SEQ ID NO: 1946
  Description of Artificial Sequence: Synthetic oligonucleotide
  Description of Combined DNA/RNA Molecule: Synthetic oligonucleotide

SEQ ID NO: 6455 - DNA, 47 bp, Artificial Sequence; identical to SEQ ID NO: 1947
  Description of Artificial Sequence: Synthetic oligonucleotide

SEQ ID NO: 6456 - DNA, 31 bp, Artificial Sequence; identical to SEQ ID NO: 1948
  Description of Artificial Sequence: Synthetic probe

SEQ ID NO: 6457 - DNA, 21 bp, Artificial Sequence
  Description of Artificial Sequence: Synthetic primer
tactatcgtatcacgccgaca

SEQ ID NO: 6458 - DNA, 19 bp, Artificial Sequence
  Description of Artificial Sequence: Synthetic primer
ttagcccacggacgttaca

SEQ ID NO: 6459 - DNA, 47 bp, Artificial Sequence; identical to SEQ ID NO: 1951
  Description of Artificial Sequence: Synthetic primer
  Description of Combined DNA/RNA Molecule: Synthetic primer

SEQ ID NO: 6460 - DNA, 43 bp, Artificial Sequence; identical to SEQ ID NO: 4073
  Description of Artificial Sequence: Synthetic primer
  Description of Combined DNA/RNA Molecule: Synthetic primer

SEQ ID NO: 6461 - DNA, 45 bp, Artificial Sequence; identical to SEQ ID NO: 4074
  Description of Artificial Sequence: Synthetic primer
  Description of Combined DNA/RNA Molecule: Synthetic primer

SEQ ID NO: 6462 - DNA, 57 bp, Artificial Sequence; identical to SEQ ID NO: 4075
  Description of Artificial Sequence: Synthetic primer
  Description of Combined DNA/RNA Molecule: Synthetic primer

SEQ ID NO: 6463 - DNA, 55 bp, Artificial Sequence; identical to SEQ ID NO: 4076
  Description of Artificial Sequence: Synthetic oligonucleotide
  Description of Combined DNA/RNA Molecule: Synthetic oligonucleotide

SEQ ID NO: 6464 - DNA, 53 bp, Artificial Sequence; identical to SEQ ID NO: 4077
  Description of Artificial Sequence: Synthetic oligonucleotide

SEQ ID NO: 6465 - DNA, 33 bp, Artificial Sequence; identical to SEQ ID NO: 4078
  Description of Artificial Sequence: Synthetic probe

SEQ ID NO: 6466 - DNA, 21 bp, Artificial Sequence
  Description of Artificial Sequence: Synthetic primer
tctcataaacactccggccac

SEQ ID NO: 6467 - DNA, 20 bp, Artificial Sequence
  Description of Artificial Sequence: Synthetic primer
tctgcccgttattgagccac

SEQ ID NO: 6468 - DNA, 49 bp, Artificial Sequence; identical to SEQ ID NO: 4081
  Description of Artificial Sequence: Synthetic primer
  Description of Combined DNA/RNA Molecule: Synthetic primer

SEQ ID NO: 6469 - DNA, 38 bp, Artificial Sequence; identical to SEQ ID NO: 1208
  Description of Artificial Sequence: Synthetic primer
  Description of Combined DNA/RNA Molecule: Synthetic primer

SEQ ID NO: 6470 - DNA, 54 bp, Artificial Sequence; identical to SEQ ID NO: 1209
  Description of Artificial Sequence: Synthetic primer
  Description of Combined DNA/RNA Molecule: Synthetic primer

SEQ ID NO: 6471 - DNA, 49 bp, Artificial Sequence; identical to SEQ ID NO: 1210
  Description of Artificial Sequence: Synthetic oligonucleotide
  Description of Combined DNA/RNA Molecule: Synthetic oligonucleotide

SEQ ID NO: 6472 - DNA, 42 bp, Artificial Sequence; identical to SEQ ID NO: 1211
  Description of Artificial Sequence: Synthetic oligonucleotide

SEQ ID NO: 6473 - DNA, 24 bp, Artificial Sequence
  Description of Artificial Sequence: Synthetic probe
ttggacgcagaaccaggtgaggag

SEQ ID NO: 6474 - DNA, 19 bp, Artificial Sequence
  Description of Artificial Sequence: Synthetic primer
ttcagcagcctggcatcac

SEQ ID NO: 6475 - DNA, 19 bp, Artificial Sequence
  Description of Artificial Sequence: Synthetic primer
tgcaaccttagcgctccac

SEQ ID NO: 6476 - DNA, 48 bp, Artificial Sequence; identical to SEQ ID NO: 1215
  Description of Artificial Sequence: Synthetic primer
  Description of Combined DNA/RNA Molecule: Synthetic primer

SEQ ID NO: 6477 - DNA, 25 bp, Artificial Sequence
  Description of Artificial Sequence: Synthetic primer
  Description of Combined DNA/RNA Molecule: Synthetic primer
acgacgacgacttgacgaacataac

SEQ ID NO: 6478 - DNA, 38 bp, Artificial Sequence; identical to SEQ ID NO: 1278
  Description of Artificial Sequence: Synthetic primer
  Description of Combined DNA/RNA Molecule: Synthetic primer

SEQ ID NO: 6479 - DNA, 40 bp, Artificial Sequence; identical to SEQ ID NO: 1279
  Description of Artificial Sequence: Synthetic primer
  Description of Combined DNA/RNA Molecule: Synthetic primer

SEQ ID NO: 6480 - DNA, 48 bp, Artificial Sequence; identical to SEQ ID NO: 1280
  Description of Artificial Sequence: Synthetic primer
  Description of Combined DNA/RNA Molecule: Synthetic primer

SEQ ID NO: 6481 - DNA, 50 bp, Artificial Sequence; identical to SEQ ID NO: 1281
  Description of Artificial Sequence: Synthetic oligonucleotide
  Description of Combined DNA/RNA Molecule: Synthetic oligonucleotide

SEQ ID NO: 6482 - DNA, 44 bp, Artificial Sequence; identical to SEQ ID NO: 1282
  Description of Artificial Sequence: Synthetic oligonucleotide

SEQ ID NO: 6483 - DNA, 28 bp, Artificial Sequence
  Description of Artificial Sequence: Synthetic probe
aactgtacagggatcacaggcccccaag

SEQ ID NO: 6484 - DNA, 21 bp, Artificial Sequence
  Description of Artificial Sequence: Synthetic primer
tcatcgccctcagatcttcca

SEQ ID NO: 6485 - DNA, 21 bp, Artificial Sequence
  Description of Artificial Sequence: Synthetic primer
tgccctccaatctatcctcca

SEQ ID NO: 6486 - DNA, 44 bp, Artificial Sequence; identical to SEQ ID NO: 1286
  Description of Artificial Sequence: Synthetic primer
  Description of Combined DNA/RNA Molecule: Synthetic primer

SEQ ID NO: 6487 - DNA, 37 bp, Artificial Sequence; identical to SEQ ID NO: 1647
  Description of Artificial Sequence: Synthetic primer
  Description of Combined DNA/RNA Molecule: Synthetic primer

SEQ ID NO: 6488 - DNA, 42 bp, Artificial Sequence; identical to SEQ ID NO: 1648
  Description of Artificial Sequence: Synthetic primer
  Description of Combined DNA/RNA Molecule: Synthetic primer

SEQ ID NO: 6489 - DNA, 48 bp, Artificial Sequence; identical to SEQ ID NO: 1649
  Description of Artificial Sequence: Synthetic primer
  Description of Combined DNA/RNA Molecule: Synthetic primer

SEQ ID NO: 6490 - DNA, 48 bp, Artificial Sequence; identical to SEQ ID NO: 1650
  Description of Artificial Sequence: Synthetic oligonucleotide
  Description of Combined DNA/RNA Molecule: Synthetic oligonucleotide

SEQ ID NO: 6491 - DNA, 57 bp, Artificial Sequence; identical to SEQ ID NO: 1651
  Description of Artificial Sequence: Synthetic oligonucleotide

SEQ ID NO: 6492 - DNA, 36 bp, Artificial Sequence; identical to SEQ ID NO: 1652
  Description of Artificial Sequence: Synthetic probe

SEQ ID NO: 6493 - DNA, 20 bp, Artificial Sequence
  Description of Artificial Sequence: Synthetic primer
tccgggtatacactgtccca

SEQ ID NO: 6494 - DNA, 21 bp, Artificial Sequence
  Description of Artificial Sequence: Synthetic primer
tggcctgtcctctgttaacca

SEQ ID NO: 6495 - DNA, 46 bp, Artificial Sequence; identical to SEQ ID NO: 1655
  Description of Artificial Sequence: Synthetic primer
  Description of Combined DNA/RNA Molecule: Synthetic primer

SEQ ID NO: 6496 - DNA, 37 bp, Artificial Sequence; identical to SEQ ID NO: 1916
  Description of Artificial Sequence: Synthetic primer
  Description of Combined DNA/RNA Molecule: Synthetic primer

SEQ ID NO: 6497 - DNA, 37 bp, Artificial Sequence; identical to SEQ ID NO: 1917
  Description of Artificial Sequence: Synthetic primer
  Description of Combined DNA/RNA Molecule: Synthetic primer

SEQ ID NO: 6498 - DNA, 55 bp, Artificial Sequence; identical to SEQ ID NO: 1918
  Description of Artificial Sequence: Synthetic primer
  Description of Combined DNA/RNA Molecule: Synthetic primer

SEQ ID NO: 6499 - DNA, 49 bp, Artificial Sequence; identical to SEQ ID NO: 1919
  Description of Artificial Sequence: Synthetic oligonucleotide
  Description of Combined DNA/RNA Molecule: Synthetic oligonucleotide

SEQ ID NO: 6500 - DNA, 47 bp, Artificial Sequence; identical to SEQ ID NO: 1920
  Description of Artificial Sequence: Synthetic oligonucleotide

SEQ ID NO: 6501 - DNA, 24 bp, Artificial Sequence
  Description of Artificial Sequence: Synthetic probe
aaagccgcaatggaacacactggg

SEQ ID NO: 6502 - DNA, 20 bp, Artificial Sequence
  Description of Artificial Sequence: Synthetic primer
ttcttgcggttctggaacac

SEQ ID NO: 6503 - DNA, 21 bp, Artificial Sequence
  Description of Artificial Sequence: Synthetic primer
ttagcaacaacggagcatcac

SEQ ID NO: 6504 - DNA, 50 bp, Artificial Sequence; identical to SEQ ID NO: 1924
  Description of Artificial Sequence: Synthetic primer
  Description of Combined DNA/RNA Molecule: Synthetic primer

SEQ ID NO: 6505 - DNA, 38 bp, Artificial Sequence; identical to SEQ ID NO: 5172
  Description of Artificial Sequence: Synthetic primer
  Description of Combined DNA/RNA Molecule: Synthetic primer

SEQ ID NO: 6506 - DNA, 37 bp, Artificial Sequence; identical to SEQ ID NO: 5173
  Description of Artificial Sequence: Synthetic primer
  Description of Combined DNA/RNA Molecule: Synthetic primer

SEQ ID NO: 6507 - DNA, 47 bp, Artificial Sequence; identical to SEQ ID NO: 5174
  Description of Artificial Sequence: Synthetic primer
  Description of Combined DNA/RNA Molecule: Synthetic primer

SEQ ID NO: 6508 - DNA, 46 bp, Artificial Sequence; identical to SEQ ID NO: 5175
  Description of Artificial Sequence: Synthetic oligonucleotide
  Description of Combined DNA/RNA Molecule: Synthetic oligonucleotide

SEQ ID NO: 6509 - DNA, 49 bp, Artificial Sequence; identical to SEQ ID NO: 5176
  Description of Artificial Sequence: Synthetic oligonucleotide

SEQ ID NO: 6510 - DNA, 22 bp, Artificial Sequence
  Description of Artificial Sequence: Synthetic probe
tttggcgcagagcacacagctg

SEQ ID NO: 6511 - DNA, 20 bp, Artificial Sequence
  Description of Artificial Sequence: Synthetic primer
tatggactgtaccagcccaa

SEQ ID NO: 6512 - DNA, 21 bp, Artificial Sequence
  Description of Artificial Sequence: Synthetic primer
tgaacaccgcctcagtttcaa

SEQ ID NO: 6513 - DNA, 48 bp, Artificial Sequence; identical to SEQ ID NO: 5180
  Description of Artificial Sequence: Synthetic primer
  Description of Combined DNA/RNA Molecule: Synthetic primer

SEQ ID NO: 6514 - DNA, 37 bp, Artificial Sequence; identical to SEQ ID NO: 5243
  Description of Artificial Sequence: Synthetic primer
  Description of Combined DNA/RNA Molecule: Synthetic primer

SEQ ID NO: 6515 - DNA, 38 bp, Artificial Sequence; identical to SEQ ID NO: 5244
  Description of Artificial Sequence: Synthetic primer
  Description of Combined DNA/RNA Molecule: Synthetic primer

SEQ ID NO: 6516 - DNA, 53 bp, Artificial Sequence; identical to SEQ ID NO: 5245
  Description of Artificial Sequence: Synthetic primer
  Description of Combined DNA/RNA Molecule: Synthetic primer

SEQ ID NO: 6517 - DNA, 46 bp, Artificial Sequence; identical to SEQ ID NO: 5246
  Description of Artificial Sequence: Synthetic oligonucleotide
  Description of Combined DNA/RNA Molecule: Synthetic oligonucleotide

SEQ ID NO: 6518 - DNA, 43 bp, Artificial Sequence; identical to SEQ ID NO: 5247
  Description of Artificial Sequence: Synthetic oligonucleotide

SEQ ID NO: 6519 - DNA, 23 bp, Artificial Sequence
  Description of Artificial Sequence: Synthetic probe
ttctgaacaggtggagctgcagc

SEQ ID NO: 6520 - DNA, 22 bp, Artificial Sequence
  Description of Artificial Sequence: Synthetic primer
tatcgcatcaaatggagagcaa

SEQ ID NO: 6521 - DNA, 22 bp, Artificial Sequence
  Description of Artificial Sequence: Synthetic primer
tgcaacgtataacagcggtcaa

SEQ ID NO: 6522 - DNA, 50 bp, Artificial Sequence; identical to SEQ ID NO: 5251
  Description of Artificial Sequence: Synthetic primer
  Description of Combined DNA/RNA Molecule: Synthetic primer

SEQ ID NO: 6523 - DNA, 37 bp, Artificial Sequence; identical to SEQ ID NO: 5252
  Description of Artificial Sequence: Synthetic primer
  Description of Combined DNA/RNA Molecule: Synthetic primer

SEQ ID NO: 6524 - DNA, 37 bp, Artificial Sequence; identical to SEQ ID NO: 5253
  Description of Artificial Sequence: Synthetic primer
  Description of Combined DNA/RNA Molecule: Synthetic primer

SEQ ID NO: 6525 - DNA, 50 bp, Artificial Sequence; identical to SEQ ID NO: 5254
  Description of Artificial Sequence: Synthetic primer
  Description of Combined DNA/RNA Molecule: Synthetic primer

SEQ ID NO: 6526 - DNA, 50 bp, Artificial Sequence; identical to SEQ ID NO: 5255
  Description of Artificial Sequence: Synthetic oligonucleotide
  Description of Combined DNA/RNA Molecule: Synthetic oligonucleotide

SEQ ID NO: 6527 - DNA, 46 bp, Artificial Sequence; identical to SEQ ID NO: 5256
  Description of Artificial Sequence: Synthetic oligonucleotide

SEQ ID NO: 6528 - DNA, 25 bp, Artificial Sequence
  Description of Artificial Sequence: Synthetic probe
ttgccatcaccaccacagccacctt

SEQ ID NO: 6529 - DNA, 22 bp, Artificial Sequence
  Description of Artificial Sequence: Synthetic primer
tcctagtacctacagtgggcaa

SEQ ID NO: 6530 - DNA, 22 bp, Artificial Sequence
  Description of Artificial Sequence: Synthetic primer
tgcaacgtataacagcggtcaa

SEQ ID NO: 6531 - DNA, 45 bp, Artificial Sequence; identical to SEQ ID NO: 5260
  Description of Artificial Sequence: Synthetic primer
  Description of Combined DNA/RNA Molecule: Synthetic primer

SEQ ID NO: 6532 - DNA, 48 bp, Artificial Sequence; identical to SEQ ID NO: 5288
  Description of Artificial Sequence: Synthetic primer
  Description of Combined DNA/RNA Molecule: Synthetic primer

SEQ ID NO: 6533 - DNA, 46 bp, Artificial Sequence; identical to SEQ ID NO: 5289
  Description of Artificial Sequence: Synthetic primer
  Description of Combined DNA/RNA Molecule: Synthetic primer

SEQ ID NO: 6534 - DNA, 52 bp, Artificial Sequence; identical to SEQ ID NO: 5290
  Description of Artificial Sequence: Synthetic primer
  Description of Combined DNA/RNA Molecule: Synthetic primer

SEQ ID NO: 6535 - DNA, 47 bp, Artificial Sequence; identical to SEQ ID NO: 5291
  Description of Artificial Sequence: Synthetic oligonucleotide
  Description of Combined DNA/RNA Molecule: Synthetic oligonucleotide

SEQ ID NO: 6536 - DNA, 50 bp, Artificial Sequence; identical to SEQ ID NO: 5292
  Description of Artificial Sequence: Synthetic oligonucleotide

SEQ ID NO: 6537 - DNA, 29 bp, Artificial Sequence
  Description of Artificial Sequence: Synthetic probe
aactcttcagcaggtagcacaccttgtcc

SEQ ID NO: 6538 - DNA, 21 bp, Artificial Sequence
  Description of Artificial Sequence: Synthetic primer
tcatcgccctcagatcttcca

SEQ ID NO: 6539 - DNA, 21 bp, Artificial Sequence
  Description of Artificial Sequence: Synthetic primer
tgccctccaatctatcctcca

SEQ ID NO: 6540 - DNA, 47 bp, Artificial Sequence; identical to SEQ ID NO: 5296
  Description of Artificial Sequence: Synthetic primer
  Description of Combined DNA/RNA Molecule: Synthetic primer

SEQ ID NO: 6541 - DNA, 40 bp, Artificial Sequence; identical to SEQ ID NO: 5306
  Description of Artificial Sequence: Synthetic primer
  Description of Combined DNA/RNA Molecule: Synthetic primer

SEQ ID NO: 6542 - DNA, 40 bp, Artificial Sequence; identical to SEQ ID NO: 5307
  Description of Artificial Sequence: Synthetic primer
  Description of Combined DNA/RNA Molecule: Synthetic primer

SEQ ID NO: 6543 - DNA, 51 bp, Artificial Sequence; identical to SEQ ID NO: 5308
  Description of Artificial Sequence: Synthetic primer
  Description of Combined DNA/RNA Molecule: Synthetic primer

SEQ ID NO: 6544 - DNA, 50 bp, Artificial Sequence; identical to SEQ ID NO: 5309
  Description of Artificial Sequence: Synthetic oligonucleotide
  Description of Combined DNA/RNA Molecule: Synthetic oligonucleotide

SEQ ID NO: 6545 - DNA, 47 bp, Artificial Sequence; identical to SEQ ID NO: 5310
  Description of Artificial Sequence: Synthetic oligonucleotide

SEQ ID NO: 6546 - DNA, 28 bp, Artificial Sequence
  Description of Artificial Sequence: Synthetic probe
ttgcaaacaggcacaccagagaacccaa

SEQ ID NO: 6547 - DNA, 19 bp, Artificial Sequence
  Description of Artificial Sequence: Synthetic primer
tcgcaccggaattctgacc

SEQ ID NO: 6548 - DNA, 20 bp, Artificial Sequence
  Description of Artificial Sequence: Synthetic primer
tgccgtcatgggaaactacc

SEQ ID NO: 6549 - DNA, 45 bp, Artificial Sequence; identical to SEQ ID NO: 5314
  Description of Artificial Sequence: Synthetic primer
  Description of Combined DNA/RNA Molecule: Synthetic primer

SEQ ID NO: 6550 - DNA, 39 bp, Artificial Sequence; identical to SEQ ID NO: 5315
  Description of Artificial Sequence: Synthetic primer
  Description of Combined DNA/RNA Molecule: Synthetic primer

SEQ ID NO: 6551 - DNA, 39 bp, Artificial Sequence; identical to SEQ ID NO: 5316
  Description of Artificial Sequence: Synthetic primer
  Description of Combined DNA/RNA Molecule: Synthetic primer

SEQ ID NO: 6552 - DNA, 50 bp, Artificial Sequence; identical to SEQ ID NO: 5317
  Description of Artificial Sequence: Synthetic primer
  Description of Combined DNA/RNA Molecule: Synthetic primer

SEQ ID NO: 6553 - DNA, 51 bp, Artificial Sequence; identical to SEQ ID NO: 5318
  Description of Artificial Sequence: Synthetic oligonucleotide
  Description of Combined DNA/RNA Molecule: Synthetic oligonucleotide

SEQ ID NO: 6554 - DNA, 51 bp, Artificial Sequence; identical to SEQ ID NO: 5319
  Description of Artificial Sequence: Synthetic oligonucleotide

SEQ ID NO: 6555 - DNA, 29 bp, Artificial Sequence
  Description of Artificial Sequence: Synthetic probe
ttcccagcaccatgtgcctcaaccataac

SEQ ID NO: 6556 - DNA, 19 bp, Artificial Sequence
  Description of Artificial Sequence: Synthetic primer
ttgcacgttgtcctgcacc

SEQ ID NO: 6557 - DNA, 20 bp, Artificial Sequence
  Description of Artificial Sequence: Synthetic primer
tgccgtcatgggaaactacc

SEQ ID NO: 6558 - DNA, 44 bp, Artificial Sequence; identical to SEQ ID NO: 5323
  Description of Artificial Sequence: Synthetic primer
  Description of Combined DNA/RNA Molecule: Synthetic primer

SEQ ID NO: 6559 - DNA, 45 bp, Artificial Sequence; identical to SEQ ID NO: 5351
  Description of Artificial Sequence: Synthetic primer
  Description of Combined DNA/RNA Molecule: Synthetic primer

SEQ ID NO: 6560 - DNA, 46 bp, Artificial Sequence; identical to SEQ ID NO: 5352
  Description of Artificial Sequence: Synthetic primer
  Description of Combined DNA/RNA Molecule: Synthetic primer

SEQ ID NO: 6561 - DNA, 53 bp, Artificial Sequence; identical to SEQ ID NO: 5353
  Description of Artificial Sequence: Synthetic primer
  Description of Combined DNA/RNA Molecule: Synthetic primer

SEQ ID NO: 6562 - DNA, 56 bp, Artificial Sequence; identical to SEQ ID NO: 5354
  Description of Artificial Sequence: Synthetic oligonucleotide
  Description of Combined DNA/RNA Molecule: Synthetic oligonucleotide

SEQ ID NO: 6563 - DNA, 44 bp, Artificial Sequence; identical to SEQ ID NO: 5355
  Description of Artificial Sequence: Synthetic oligonucleotide

SEQ ID NO: 6564 - DNA, 26 bp, Artificial Sequence
  Description of Artificial Sequence: Synthetic probe
ttaactccagcccacttctccaaggg

SEQ ID NO: 6565 - DNA, 21 bp, Artificial Sequence
  Description of Artificial Sequence: Synthetic primer
ttgcatttcgttagcgacaca

SEQ ID NO: 6566 - DNA, 20 bp, Artificial Sequence
  Description of Artificial Sequence: Synthetic primer
tgcgggtagatcgactcaca

SEQ ID NO: 6567 - DNA, 51 bp, Artificial Sequence; identical to SEQ ID NO: 5359
  Description of Artificial Sequence: Synthetic primer
  Description of Combined DNA/RNA Molecule: Synthetic primer

SEQ ID NO: 6568 - DNA, 38 bp, Artificial Sequence; identical to SEQ ID NO: 5360
  Description of Artificial Sequence: Synthetic primer
  Description of Combined DNA/RNA Molecule: Synthetic primer

SEQ ID NO: 6569 - DNA, 40 bp, Artificial Sequence; identical to SEQ ID NO: 5361
  Description of Artificial Sequence: Synthetic primer
  Description of Combined DNA/RNA Molecule: Synthetic primer

SEQ ID NO: 6570 - DNA, 52 bp, Artificial Sequence; identical to SEQ ID NO: 5362
  Description of Artificial Sequence: Synthetic primer
  Description of Combined DNA/RNA Molecule: Synthetic primer

SEQ ID NO: 6571 - DNA, 48 bp, Artificial Sequence; identical to SEQ ID NO: 5363
  Description of Artificial Sequence: Synthetic oligonucleotide
  Description of Combined DNA/RNA Molecule: Synthetic oligonucleotide

SEQ ID NO: 6572 - DNA, 44 bp, Artificial Sequence; identical to SEQ ID NO: 5364
  Description of Artificial Sequence: Synthetic oligonucleotide

SEQ ID NO: 6573 - DNA, 26 bp, Artificial Sequence
  Description of Artificial Sequence: Synthetic probe
ttgcactcagacacacaccacccagg

SEQ ID NO: 6574 - DNA, 21 bp, Artificial Sequence
  Description of Artificial Sequence: Synthetic primer
ttgcatttcgttagcgacaca

SEQ ID NO: 6575 - DNA, 20 bp, Artificial Sequence
  Description of Artificial Sequence: Synthetic primer
tgcgggtagatcgactcaca

SEQ ID NO: 6576 - DNA, 47 bp, Artificial Sequence; identical to SEQ ID NO: 5368
  Description of Artificial Sequence: Synthetic primer
  Description of Combined DNA/RNA Molecule: Synthetic primer

SEQ ID NO: 6577 - DNA, 41 bp, Artificial Sequence; identical to SEQ ID NO: 5378
  Description of Artificial Sequence: Synthetic primer
  Description of Combined DNA/RNA Molecule: Synthetic primer

SEQ ID NO: 6578 - DNA, 41 bp, Artificial Sequence; identical to SEQ ID NO: 5379
  Description of Artificial Sequence: Synthetic primer
  Description of Combined DNA/RNA Molecule: Synthetic primer

SEQ ID NO: 6579 - DNA, 54 bp, Artificial Sequence; identical to SEQ ID NO: 5380
  Description of Artificial Sequence: Synthetic primer
  Description of Combined DNA/RNA Molecule: Synthetic primer

SEQ ID NO: 6580 - DNA, 49 bp, Artificial Sequence; identical to SEQ ID NO: 5381
  Description of Artificial Sequence: Synthetic oligonucleotide
  Description of Combined DNA/RNA Molecule: Synthetic oligonucleotide

SEQ ID NO: 6581 - DNA, 54 bp, Artificial Sequence; identical to SEQ ID NO: 5382
  Description of Artificial Sequence: Synthetic oligonucleotide

SEQ ID NO: 6582 - DNA, 26 bp, Artificial Sequence
  Description of Artificial Sequence: Synthetic probe
ttggacgcaagagaaggcagcaccac

SEQ ID NO: 6583 - DNA, 22 bp, Artificial Sequence
  Description of Artificial Sequence: Synthetic primer
tctcatgggcgctagtatcaac

SEQ ID NO: 6584 - DNA, 22 bp, Artificial Sequence
  Description of Artificial Sequence: Synthetic primer
tgcgggtatcaatcagggaaac

SEQ ID NO: 6585 - DNA, 44 bp, Artificial Sequence; identical to SEQ ID NO: 5386
  Description of Artificial Sequence: Synthetic primer
  Description of Combined DNA/RNA Molecule: Synthetic primer

SEQ ID NO: 6586 - DNA, 42 bp, Artificial Sequence; identical to SEQ ID NO: 5505
  Description of Artificial Sequence: Synthetic primer
  Description of Combined DNA/RNA Molecule: Synthetic primer

SEQ ID NO: 6587 - DNA, 41 bp, Artificial Sequence; identical to SEQ ID NO: 5506
  Description of Artificial Sequence: Synthetic primer
  Description of Combined DNA/RNA Molecule: Synthetic primer

SEQ ID NO: 6588 - DNA, 50 bp, Artificial Sequence; identical to SEQ ID NO: 5507
  Description of Artificial Sequence: Synthetic primer
  Description of Combined DNA/RNA Molecule: Synthetic primer

SEQ ID NO: 6589 - DNA, 53 bp, Artificial Sequence; identical to SEQ ID NO: 5508
  Description of Artificial Sequence: Synthetic oligonucleotide
  Description of Combined DNA/RNA Molecule: Synthetic oligonucleotide

SEQ ID NO: 6590 - DNA, 51 bp, Artificial Sequence; identical to SEQ ID NO: 5509
  Description of Artificial Sequence: Synthetic oligonucleotide

SEQ ID NO: 6591 - DNA, 26 bp, Artificial Sequence
  Description of Artificial Sequence: Synthetic probe
aaggccgcatcccaaccagtttcaac

SEQ ID NO: 6592 - DNA, 21 bp, Artificial Sequence
  Description of Artificial Sequence: Synthetic primer
tctcgggaccacaatacgaac

SEQ ID NO: 6593 - DNA, 20 bp, Artificial Sequence
  Description of Artificial Sequence: Synthetic primer
tggcaccagcttagcgtaac

SEQ ID NO: 6594 - DNA, 46 bp, Artificial Sequence; identical to SEQ ID NO: 5513
  Description of Artificial Sequence: Synthetic primer
  Description of Combined DNA/RNA Molecule: Synthetic primer

SEQ ID NO: 6595 - DNA, 47 bp, Artificial Sequence; identical to SEQ ID NO: 5514
  Description of Artificial Sequence: Synthetic primer
  Description of Combined DNA/RNA Molecule: Synthetic primer

SEQ ID NO: 6596 - DNA, 44 bp, Artificial Sequence; identical to SEQ ID NO: 5515
  Description of Artificial Sequence: Synthetic primer
  Description of Combined DNA/RNA Molecule: Synthetic primer

SEQ ID NO: 6597 - DNA, 53 bp, Artificial Sequence; identical to SEQ ID NO: 5516
  Description of Artificial Sequence: Synthetic primer
  Description of Combined DNA/RNA Molecule: Synthetic primer

SEQ ID NO: 6598 - DNA, 48 bp, Artificial Sequence; identical to SEQ ID NO: 5517
  Description of Artificial Sequence: Synthetic oligonucleotide
  Description of Combined DNA/RNA Molecule: Synthetic oligonucleotide

SEQ ID NO: 6599 - DNA, 59 bp, Artificial Sequence; identical to SEQ ID NO: 5518
  Description of Artificial Sequence: Synthetic oligonucleotide

SEQ ID NO: 6600 - DNA, 36 bp, Artificial Sequence; identical to SEQ ID NO: 5519
  Description of Artificial Sequence: Synthetic probe

SEQ ID NO: 6601 - DNA, 21 bp, Artificial Sequence
  Description of Artificial Sequence: Synthetic primer
tcacagagacttgccgatcac

SEQ ID NO: 6602 - DNA, 22 bp, Artificial Sequence
  Description of Artificial Sequence: Synthetic primer
tggccatgtctaagctacacac

SEQ ID NO: 6603 - DNA, 42 bp, Artificial Sequence; identical to SEQ ID NO: 5638
  Description of Artificial Sequence: Synthetic primer
  Description of Combined DNA/RNA Molecule: Synthetic primer

SEQ ID NO: 6604 - DNA, 40 bp, Artificial Sequence; identical to SEQ ID NO: 5639
  Description of Artificial Sequence: Synthetic primer
  Description of Combined DNA/RNA Molecule: Synthetic primer

SEQ ID NO: 6605 - DNA, 53 bp, Artificial Sequence; identical to SEQ ID NO: 5640
  Description of Artificial Sequence: Synthetic primer
  Description of Combined DNA/RNA Molecule: Synthetic primer

SEQ ID NO: 6606 - DNA, 46 bp, Artificial Sequence; identical to SEQ ID NO: 5641
  Description of Artificial Sequence: Synthetic oligonucleotide
  Description of Combined DNA/RNA Molecule: Synthetic oligonucleotide

SEQ ID NO: 6607 - DNA, 45 bp, Artificial Sequence; identical to SEQ ID NO: 5642
  Description of Artificial Sequence: Synthetic oligonucleotide

SEQ ID NO: 6608 - DNA, 28 bp, Artificial Sequence
  Description of Artificial Sequence: Synthetic probe
aaacagacagccaccagctgaatgaagc

SEQ ID NO: 6609 - DNA, 21 bp, Artificial Sequence
  Description of Artificial Sequence: Synthetic primer
tcacgcacgtagggtctaaac

SEQ ID NO: 6610 - DNA, 20 bp, Artificial Sequence
  Description of Artificial Sequence: Synthetic primer
tgtaaccacagccggacaac

SEQ ID NO: 6611 - DNA, 47 bp, Artificial Sequence; identical to SEQ ID NO: 5646
  Description of Artificial Sequence: Synthetic primer
  Description of Combined DNA/RNA Molecule: Synthetic primer

SEQ ID NO: 6612 - DNA, 44 bp, Artificial Sequence; identical to SEQ ID NO: 5701
  Description of Artificial Sequence: Synthetic primer
  Description of Combined DNA/RNA Molecule: Synthetic primer

SEQ ID NO: 6613 - DNA, 45 bp, Artificial Sequence; identical to SEQ ID NO: 5702
  Description of Artificial Sequence: Synthetic primer
  Description of Combined DNA/RNA Molecule: Synthetic primer

SEQ ID NO: 6614 - DNA, 54 bp, Artificial Sequence; identical to SEQ ID NO: 5703
  Description of Artificial Sequence: Synthetic primer
  Description of Combined DNA/RNA Molecule: Synthetic primer

SEQ ID NO: 6615 - DNA, 51 bp, Artificial Sequence; identical to SEQ ID NO: 5704
  Description of Artificial Sequence: Synthetic oligonucleotide
  Description of Combined DNA/RNA Molecule: Synthetic oligonucleotide

SEQ ID NO: 6616 - DNA, 46 bp, Artificial Sequence; identical to SEQ ID NO: 5705
  Description of Artificial Sequence: Synthetic oligonucleotide

SEQ ID NO: 6617 - DNA, 27 bp, Artificial Sequence
  Description of Artificial Sequence: Synthetic probe
ttatcaccatgtcacacacaggagcca

SEQ ID NO: 6618 - DNA, 19 bp, Artificial Sequence
  Description of Artificial Sequence: Synthetic primer
ttcgctgcccggttaaaca

SEQ ID NO: 6619 - DNA, 22 bp, Artificial Sequence
  Description of Artificial Sequence: Synthetic primer
tgtcgagctaggtccgataaca

SEQ ID NO: 6620 - DNA, 54 bp, Artificial Sequence; identical to SEQ ID NO: 5709
  Description of Artificial Sequence: Synthetic primer
  Description of Combined DNA/RNA Molecule: Synthetic primer

SEQ ID NO: 6621 - DNA, 47 bp, Artificial Sequence; identical to SEQ ID NO: 632
  Description of Artificial Sequence: Synthetic primer
  Description of Combined DNA/RNA Molecule: Synthetic primer

SEQ ID NO: 6622 - DNA, 39 bp, Artificial Sequence; identical to SEQ ID NO: 633
  Description of Artificial Sequence: Synthetic primer
  Description of Combined DNA/RNA Molecule: Synthetic primer

SEQ ID NO: 6623 - DNA, 57 bp, Artificial Sequence; identical to SEQ ID NO: 5712
  Description of Artificial Sequence: Synthetic primer
  Description of Combined DNA/RNA Molecule: Synthetic primer

SEQ ID NO: 6624 - DNA, 48 bp, Artificial Sequence; identical to SEQ ID NO: 5713
  Description of Artificial Sequence: Synthetic oligonucleotide
  Description of Combined DNA/RNA Molecule: Synthetic oligonucleotide

SEQ ID NO: 6625 - DNA, 49 bp, Artificial Sequence; identical to SEQ ID NO: 5714
  Description of Artificial Sequence: Synthetic oligonucleotide

SEQ ID NO: 6626 - DNA, 24 bp, Artificial Sequence
  Description of Artificial Sequence: Synthetic probe
ttcctcgcaccttcatggccccaa

SEQ ID NO: 6627 - DNA, 19 bp, Artificial Sequence
  Description of Artificial Sequence: Synthetic primer
ttcgctgcccggttaaaca

SEQ ID NO: 6628 - DNA, 22 bp, Artificial Sequence
  Description of Artificial Sequence: Synthetic primer
tgtcgagctaggtccgataaca

SEQ ID NO: 6629 - DNA, 56 bp, Artificial Sequence; identical to SEQ ID NO: 5718
  Description of Artificial Sequence: Synthetic primer
  Description of Combined DNA/RNA Molecule: Synthetic primer

SEQ ID NO: 6630 - DNA, 44 bp, Artificial Sequence; identical to SEQ ID NO: 5737
  Description of Artificial Sequence: Synthetic primer
  Description of Combined DNA/RNA Molecule: Synthetic primer

SEQ ID NO: 6631 - DNA, 43 bp, Artificial Sequence; identical to SEQ ID NO: 5738
  Description of Artificial Sequence: Synthetic primer
  Description of Combined DNA/RNA Molecule: Synthetic primer

SEQ ID NO: 6632 - DNA, 52 bp, Artificial Sequence; identical to SEQ ID NO: 5739
  Description of Artificial Sequence: Synthetic primer
  Description of Combined DNA/RNA Molecule: Synthetic primer

SEQ ID NO: 6633 - DNA, 45 bp, Artificial Sequence; identical to SEQ ID NO: 5740
  Description of Artificial Sequence: Synthetic oligonucleotide
  Description of Combined DNA/RNA Molecule: Synthetic oligonucleotide

SEQ ID NO: 6634 - DNA, 49 bp, Artificial Sequence; identical to SEQ ID NO: 5741
  Description of Artificial Sequence: Synthetic oligonucleotide

SEQ ID NO: 6635 - DNA, 25 bp, Artificial Sequence
  Description of Artificial Sequence: Synthetic probe
ttgcactcagggtcctcagcactgc

SEQ ID NO: 6636 - DNA, 22 bp, Artificial Sequence
  Description of Artificial Sequence: Synthetic primer
tcctgctctgaaaacctacacc

SEQ ID NO: 6637 - DNA, 22 bp, Artificial Sequence
  Description of Artificial Sequence: Synthetic primer
tgtctaagccgcctatgtaacc

SEQ ID NO: 6638 - DNA, 50 bp, Artificial Sequence; identical to SEQ ID NO: 5745
  Description of Artificial Sequence: Synthetic primer
  Description of Combined DNA/RNA Molecule: Synthetic primer

SEQ ID NO: 6639 - DNA, 52 bp, Artificial Sequence; identical to SEQ ID NO: 4564
  Description of Artificial Sequence: Synthetic primer
  Description of Combined DNA/RNA Molecule: Synthetic primer

SEQ ID NO: 6640 - DNA, 54 bp, Artificial Sequence; identical to SEQ ID NO: 4565
  Description of Artificial Sequence: Synthetic primer
  Description of Combined DNA/RNA Molecule: Synthetic primer

SEQ ID NO: 6641 - DNA, 51 bp, Artificial Sequence; identical to SEQ ID NO: 4566
  Description of Artificial Sequence: Synthetic primer
  Description of Combined DNA/RNA Molecule: Synthetic primer

SEQ ID NO: 6642 - DNA, 45 bp, Artificial Sequence; identical to SEQ ID NO: 4567
  Description of Artificial Sequence: Synthetic oligonucleotide
  Description of Combined DNA/RNA Molecule: Synthetic oligonucleotide

SEQ ID NO: 6643 - DNA, 52 bp, Artificial Sequence; identical to SEQ ID NO: 4568
  Description of Artificial Sequence: Synthetic oligonucleotide

SEQ ID NO: 6644 - DNA, 32 bp, Artificial Sequence; identical to SEQ ID NO: 4569
  Description of Artificial Sequence: Synthetic probe

SEQ ID NO: 6645 - DNA, 20 bp, Artificial Sequence
  Description of Artificial Sequence: Synthetic primer
tttttacgcacagcaccacc

SEQ ID NO: 6646 - DNA, 22 bp, Artificial Sequence
  Description of Artificial Sequence: Synthetic primer
tgtctaagccgcctatgtaacc

SEQ ID NO: 6647 - DNA, 48 bp, Artificial Sequence; identical to SEQ ID NO: 4572
  Description of Artificial Sequence: Synthetic primer
  Description of Combined DNA/RNA Molecule: Synthetic primer

SEQ ID NO: 6648 - DNA, 55 bp, Artificial Sequence; identical to SEQ ID NO: 5931
  Description of Artificial Sequence: Synthetic primer
  Description of Combined DNA/RNA Molecule: Synthetic primer

SEQ ID NO: 6649 - DNA, 52 bp, Artificial Sequence; identical to SEQ ID NO: 5932
  Description of Artificial Sequence: Synthetic primer
  Description of Combined DNA/RNA Molecule: Synthetic primer

SEQ ID NO: 6650 - DNA, 65 bp, Artificial Sequence; identical to SEQ ID NO: 5933
  Description of Artificial Sequence: Synthetic primer
  Description of Combined DNA/RNA Molecule: Synthetic primer

SEQ ID NO: 6651 - DNA, 43 bp, Artificial Sequence; identical to SEQ ID NO: 5934
  Description of Artificial Sequence: Synthetic oligonucleotide
  Description of Combined DNA/RNA Molecule: Synthetic oligonucleotide

SEQ ID NO: 6652 - DNA, 51 bp, Artificial Sequence; identical to SEQ ID NO: 5935
  Description of Artificial Sequence: Synthetic oligonucleotide

SEQ ID NO: 6653 - DNA, 33 bp, Artificial Sequence; identical to SEQ ID NO: 5936
  Description of Artificial Sequence: Synthetic probe

SEQ ID NO: 6654 - DNA, 19 bp, Artificial Sequence
  Description of Artificial Sequence: Synthetic primer
ttgcaaaccacccggacaa

SEQ ID NO: 6655 - DNA, 20 bp, Artificial Sequence
  Description of Artificial Sequence: Synthetic primer
taggagtcgatgctgaccaa

SEQ ID NO: 6656 - DNA, 59 bp, Artificial Sequence; identical to SEQ ID NO: 5939
  Description of Artificial Sequence: Synthetic primer
  Description of Combined DNA/RNA Molecule: Synthetic primer

SEQ ID NO: 6657 - DNA, 37 bp, Artificial Sequence; identical to SEQ ID NO: 6039
  Description of Artificial Sequence: Synthetic primer
  Description of Combined DNA/RNA Molecule: Synthetic primer

SEQ ID NO: 6658 - DNA, 38 bp, Artificial Sequence; identical to SEQ ID NO: 6040
  Description of Artificial Sequence: Synthetic primer
  Description of Combined DNA/RNA Molecule: Synthetic primer

SEQ ID NO: 6659 - DNA, 54 bp, Artificial Sequence; identical to SEQ ID NO: 6041
  Description of Artificial Sequence: Synthetic primer
  Description of Combined DNA/RNA Molecule: Synthetic primer

SEQ ID NO: 6660 - DNA, 42 bp, Artificial Sequence; identical to SEQ ID NO: 6042
  Description of Artificial Sequence: Synthetic oligonucleotide
  Description of Combined DNA/RNA Molecule: Synthetic oligonucleotide

SEQ ID NO: 6661 - DNA, 51 bp, Artificial Sequence; identical to SEQ ID NO: 6043
  Description of Artificial Sequence: Synthetic oligonucleotide

SEQ ID NO: 6662 - DNA, 26 bp, Artificial Sequence
  Description of Artificial Sequence: Synthetic probe
ttccagacagttcccccacccactag

SEQ ID NO: 6663 - DNA, 19 bp, Artificial Sequence
  Description of Artificial Sequence: Synthetic primer
ttcggcaggctacggtaca

SEQ ID NO: 6664 - DNA, 22 bp, Artificial Sequence
  Description of Artificial Sequence: Synthetic primer
tcagtcctaaaacggttcgaca

SEQ ID NO: 6665 - DNA, 50 bp, Artificial Sequence; identical to SEQ ID NO: 6047
  Description of Artificial Sequence: Synthetic primer
  Description of Combined DNA/RNA Molecule: Synthetic primer

SEQ ID NO: 6666 - DNA, 47 bp, Artificial Sequence; identical to SEQ ID NO: 6137
  Description of Artificial Sequence: Synthetic primer
  Description of Combined DNA/RNA Molecule: Synthetic primer

SEQ ID NO: 6667 - DNA, 47 bp, Artificial Sequence; identical to SEQ ID NO: 6138
  Description of Artificial Sequence: Synthetic primer
  Description of Combined DNA/RNA Molecule: Synthetic primer

SEQ ID NO: 6668 - DNA, 55 bp, Artificial Sequence; identical to SEQ ID NO: 6139
  Description of Artificial Sequence: Synthetic primer
  Description of Combined DNA/RNA Molecule: Synthetic primer

SEQ ID NO: 6669 - DNA, 52 bp, Artificial Sequence; identical to SEQ ID NO: 6140
  Description of Artificial Sequence: Synthetic oligonucleotide
  Description of Combined DNA/RNA Molecule: Synthetic oligonucleotide

SEQ ID NO: 6670 - DNA, 48 bp, Artificial Sequence; identical to SEQ ID NO: 6141
  Description of Artificial Sequence: Synthetic oligonucleotide

SEQ ID NO: 6671 - DNA, 32 bp, Artificial Sequence; identical to SEQ ID NO: 6142
  Description of Artificial Sequence: Synthetic probe

SEQ ID NO: 6672 - DNA, 21 bp, Artificial Sequence
  Description of Artificial Sequence: Synthetic primer
tccctcgtcatctcccttacc

SEQ ID NO: 6673 - DNA, 19 bp, Artificial Sequence
  Description of Artificial Sequence: Synthetic primer
tcgctccatcaccaagacc

SEQ ID NO: 6674 - DNA, 52 bp, Artificial Sequence; identical to SEQ ID NO: 6145
  Description of Artificial Sequence: Synthetic primer
  Description of Combined DNA/RNA Molecule: Synthetic primer

SEQ ID NO: 6675 - DNA, 43 bp, Artificial Sequence; identical to SEQ ID NO: 6236
  Description of Artificial Sequence: Synthetic primer
  Description of Combined DNA/RNA Molecule: Synthetic primer

SEQ ID NO: 6676 - DNA, 42 bp, Artificial Sequence; identical to SEQ ID NO: 6237
  Description of Artificial Sequence: Synthetic primer
  Description of Combined DNA/RNA Molecule: Synthetic primer

SEQ ID NO: 6677 - DNA, 56 bp, Artificial Sequence; identical to SEQ ID NO: 6238
  Description of Artificial Sequence: Synthetic primer
  Description of Combined DNA/RNA Molecule: Synthetic primer

SEQ ID NO: 6678 - DNA, 47 bp, Artificial Sequence; identical to SEQ ID NO: 6239
  Description of Artificial Sequence: Synthetic oligonucleotide
  Description of Combined DNA/RNA Molecule: Synthetic oligonucleotide

SEQ ID NO: 6679 - DNA, 42 bp, Artificial Sequence; identical to SEQ ID NO: 6240
  Description of Artificial Sequence: Synthetic oligonucleotide

SEQ ID NO: 6680 - DNA, 21 bp, Artificial Sequence
  Description of Artificial Sequence: Synthetic probe
ttcaggacaggccagccaccc

SEQ ID NO: 6681 - DNA, 22 bp, Artificial Sequence
  Description of Artificial Sequence: Synthetic primer
tagtttgtcgaaagtcccacac

SEQ ID NO: 6682 - DNA, 21 bp, Artificial Sequence
  Description of Artificial Sequence: Synthetic primer
tgcacagcctgaattttgcac

SEQ ID NO: 6683 - DNA, 48 bp, Artificial Sequence; identical to SEQ ID NO: 6244
  Description of Artificial Sequence: Synthetic primer
  Description of Combined DNA/RNA Molecule: Synthetic primer

SEQ ID NO: 6684 - DNA, 44 bp, Artificial Sequence; identical to SEQ ID NO: 6281
  Description of Artificial Sequence: Synthetic primer
  Description of Combined DNA/RNA Molecule: Synthetic primer

SEQ ID NO: 6685 - DNA, 46 bp, Artificial Sequence; identical to SEQ ID NO: 6282
  Description of Artificial Sequence: Synthetic primer
  Description of Combined DNA/RNA Molecule: Synthetic primer

SEQ ID NO: 6686 - DNA, 47 bp, Artificial Sequence; identical to SEQ ID NO: 6283
  Description of Artificial Sequence: Synthetic primer
  Description of Combined DNA/RNA Molecule: Synthetic primer

SEQ ID NO: 6687 - DNA, 45 bp, Artificial Sequence; identical to SEQ ID NO: 6284
  Description of Artificial Sequence: Synthetic oligonucleotide
  Description of Combined DNA/RNA Molecule: Synthetic oligonucleotide

SEQ ID NO: 6688 - DNA, 46 bp, Artificial Sequence; identical to SEQ ID NO: 6285
  Description of Artificial Sequence: Synthetic oligonucleotide

SEQ ID NO: 6689 - DNA, 21 bp, Artificial Sequence
  Description of Artificial Sequence: Synthetic probe
ttaagggcagggcagcaccac

SEQ ID NO: 6690 - DNA, 19 bp, Artificial Sequence
  Description of Artificial Sequence: Synthetic primer
taaccagttaccaccgcca

SEQ ID NO: 6691 - DNA, 21 bp, Artificial Sequence
  Description of Artificial Sequence: Synthetic primer
tgccctccaatctatcctcca

SEQ ID NO: 6692 - DNA, 47 bp, Artificial Sequence; identical to SEQ ID NO: 6289
  Description of Artificial Sequence: Synthetic primer
  Description of Combined DNA/RNA Molecule: Synthetic primer

SEQ ID NO: 6693 - DNA, 45 bp, Artificial Sequence; identical to SEQ ID NO: 128
  Description of Artificial Sequence: Synthetic primer
  Description of Combined DNA/RNA Molecule: Synthetic primer

SEQ ID NO: 6694 - DNA, 42 bp, Artificial Sequence; identical to SEQ ID NO: 6380
  Description of Artificial Sequence: Synthetic primer
  Description of Combined DNA/RNA Molecule: Synthetic primer

SEQ ID NO: 6695 - DNA, 52 bp, Artificial Sequence; identical to SEQ ID NO: 6381
  Description of Artificial Sequence: Synthetic primer
  Description of Combined DNA/RNA Molecule: Synthetic primer

SEQ ID NO: 6696 - DNA, 50 bp, Artificial Sequence; identical to SEQ ID NO: 6382
  Description of Artificial Sequence: Synthetic oligonucleotide
  Description of Combined DNA/RNA Molecule: Synthetic oligonucleotide

SEQ ID NO: 6697 - DNA, 43 bp, Artificial Sequence; identical to SEQ ID NO: 6383
  Description of Artificial Sequence: Synthetic oligonucleotide

SEQ ID NO: 6698 - DNA, 24 bp, Artificial Sequence
  Description of Artificial Sequence: Synthetic probe
ttactgccagcacaggagcaggag

SEQ ID NO: 6699 - DNA, 21 bp, Artificial Sequence
  Description of Artificial Sequence: Synthetic primer
tcgacgaatctgctcagacaa

SEQ ID NO: 6700 - DNA, 19 bp, Artificial Sequence
  Description of Artificial Sequence: Synthetic primer
tgctcagacgctgcttcaa

SEQ ID NO: 6701 - DNA, 45 bp, Artificial Sequence; identical to SEQ ID NO: 6387
  Description of Artificial Sequence: Synthetic primer
  Description of Combined DNA/RNA Molecule: Synthetic primer

SEQ ID NO: 6702 - DNA, 36 bp, Artificial Sequence
  Description of Artificial Sequence: Synthetic primer
  Description of Combined DNA/RNA Molecule: Synthetic primer
acgacgacgacgaacagctgccccctccccaggttc

SEQ ID NO: 6703 - DNA, 39 bp, Artificial Sequence
  Description of Artificial Sequence: Synthetic primer
  Description of Combined DNA/RNA Molecule: Synthetic primer
acgacgacgacgaagcccctcagtcacagctgccccctt

SEQ ID NO: 6704 - DNA, 53 bp, Artificial Sequence
  Description of Artificial Sequence: Synthetic primer
  Description of Combined DNA/RNA Molecule: Synthetic primer
acgacgacgacttgacgaacataatcccagtgctgtctgcctgaggtaagata

SEQ ID NO: 6705 - DNA, 58 bp, Artificial Sequence
  Description of Artificial Sequence: Synthetic oligonucleotide
  Description of Combined DNA/RNA Molecule: Synthetic oligonucleotide
tcgacgaatctgctcagacaaggtttgtttatctcaggattcaggatgctccaccctc

SEQ ID NO: 6706 - DNA, 41 bp, Artificial Sequence
  Description of Artificial Sequence: Synthetic oligonucleotide
cccctccccttctccacaggccttgaagcagcgtctgagca

SEQ ID NO: 6707 - DNA, 23 bp, Artificial Sequence
  Description of Artificial Sequence: Synthetic probe
tttgctccacccctccccttctc

SEQ ID NO: 6708 - DNA, 21 bp, Artificial Sequence
  Description of Artificial Sequence: Synthetic primer
tcgacgaatctgctcagacaa

SEQ ID NO: 6709 - DNA, 19 bp, Artificial Sequence
  Description of Artificial Sequence: Synthetic primer
tgctcagacgctgcttcaa

SEQ ID NO: 6710 - DNA, 41 bp, Artificial Sequence
  Description of Artificial Sequence: Synthetic primer
  Description of Combined DNA/RNA Molecule: Synthetic primer
tgctcagacgctgcttcaagggagagggtggcctatggagg

SEQ ID NO: 6711 - DNA, 39 bp, Artificial Sequence
  Description of Artificial Sequence: Synthetic primer
  Description of Combined DNA/RNA Molecule: Synthetic primer
acgacgacgacgaaagggccttgctcctcactcagatta

SEQ ID NO: 6712 - DNA, 40 bp, Artificial Sequence
  Description of Artificial Sequence: Synthetic primer
  Description of Combined DNA/RNA Molecule: Synthetic primer
acgacgacgacgaagggccttgctcctcactcagautggt

SEQ ID NO: 6713 - DNA, 53 bp, Artificial Sequence
  Description of Artificial Sequence: Synthetic primer
  Description of Combined DNA/RNA Molecule: Synthetic primer
acgacgacgacttgacgaacataattgcatctgctgggcttgtgatccctgcc

SEQ ID NO: 6714 - DNA, 56 bp, Artificial Sequence
  Description of Artificial Sequence: Synthetic oligonucleotide
  Description of Combined DNA/RNA Molecule: Synthetic oligonucleotide
tttccgccgctacaaccaagacagggaatcagtatcaatgtttaagcaacagcaca

SEQ ID NO: 6715 - DNA, 55 bp, Artificial Sequence
  Description of Artificial Sequence: Synthetic oligonucleotide
gcatgaggtgaatagagtcagtcagcaagagacactttgaagcagcgtctgagca

SEQ ID NO: 6716 - DNA, 31 bp, Artificial Sequence
  Description of Artificial Sequence: Synthetic probe
ccagcaacagcatgaggtgaatagagtcagt

SEQ ID NO: 6717 - DNA, 19 bp, Artificial Sequence
  Description of Artificial Sequence: Synthetic primer
tttccgccgctacaaccaa

SEQ ID NO: 6718 - DNA, 19 bp, Artificial Sequence
  Description of Artificial Sequence: Synthetic primer
tgctcagacgctgcttcaa

SEQ ID NO: 6719 - DNA, 47 bp, Artificial Sequence
  Description of Artificial Sequence: Synthetic primer
  Description of Combined DNA/RNA Molecule: Synthetic primer
tgctcagacgctgcttcaagtgatccctgctctctccccaatgtctt

SEQ ID NO: 6720 - DNA, 39 bp, Artificial Sequence
  Description of Artificial Sequence: Synthetic primer
  Description of Combined DNA/RNA Molecule: Synthetic primer
acgacgacgacgaacaagaggagaggtcctcccactgag

SEQ ID NO: 6721 - DNA, 42 bp, Artificial Sequence
  Description of Artificial Sequence: Synthetic primer
  Description of Combined DNA/RNA Molecule: Synthetic primer
acgacgacgacgaacagaaggcacaagaggagaggtcctcct

SEQ ID NO: 6722 - DNA, 49 bp, Artificial Sequence
  Description of Artificial Sequence: Synthetic primer
  Description of Combined DNA/RNA Molecule: Synthetic primer
acgacgacgacttgacgaacataatgtgaggctgggacctgacagctac

SEQ ID NO: 6723 - DNA, 50 bp, Artificial Sequence
  Description of Artificial Sequence: Synthetic oligonucleotide
  Description of Combined DNA/RNA Molecule: Synthetic oligonucleotide
tcagtgaaaacacatccacccaggttctaagggtcagcagcaacagggcc

SEQ ID NO: 6724 - DNA, 47 bp, Artificial Sequence
  Description of Artificial Sequence: Synthetic oligonucleotide
gggttgacagctttgcctaggtccctcctggtgagcagggatgagca

SEQ ID NO: 6725 - DNA, 29 bp, Artificial Sequence
  Description of Artificial Sequence: Synthetic probe
ttagcaacagggttgacagctttgcctag

SEQ ID NO: 6726 - DNA, 22 bp, Artificial Sequence
  Description of Artificial Sequence: Synthetic primer
tcagtgaaaacacatccaccca

SEQ ID NO: 6727 - DNA, 19 bp, Artificial Sequence
  Description of Artificial Sequence: Synthetic primer
tgctcatccctgctcacca

SEQ ID NO: 6728 - DNA, 46 bp, Artificial Sequence
  Description of Artificial Sequence: Synthetic primer
  Description of Combined DNA/RNA Molecule: Synthetic primer
tgctcatccctgctcaccactgggacctgacagctatggatggaga

SEQ ID NO: 6729 - DNA, 36 bp, Artificial Sequence
  Description of Artificial Sequence: Synthetic primer
  Description of Combined DNA/RNA Molecule: Synthetic primer
acgacgacgacgaaggctgggaggccaggcaggtgg

SEQ ID NO: 6730 - DNA, 39 bp, Artificial Sequence
  Description of Artificial Sequence: Synthetic primer
  Description of Combined DNA/RNA Molecule: Synthetic primer
acgacgacgacgaacacagcccccagggacacaagagga

SEQ ID NO: 6731 - DNA, 58 bp, Artificial Sequence
  Description of Artificial Sequence: Synthetic primer
  Description of Combined DNA/RNA Molecule: Synthetic primer
acgacgacgacttgacgaacataatcctctctgaattcacttgctacctgctccctga

SEQ ID NO: 6732 - DNA, 46 bp, Artificial Sequence
  Description of Artificial Sequence: Synthetic oligonucleotide
  Description of Combined DNA/RNA Molecule: Synthetic oligonucleotide
tcgtagactcgctatcgccaggtgacagctgggccatcccagccca

SEQ ID NO: 6733 - DNA, 43 bp, Artificial Sequence
  Description of Artificial Sequence: Synthetic oligonucleotide
gcctgggaaagcagaaggcccaggtggtgagcagggatgagca

SEQ ID NO: 6734 - DNA, 27 bp, Artificial Sequence
  Description of Artificial Sequence: Synthetic probe
ttcatcccagcctgggaaagcagaagg

SEQ ID NO: 6735 - DNA, 20 bp, Artificial Sequence
  Description of Artificial Sequence: Synthetic primer
tcgtagactcgctatcgcca

SEQ ID NO: 6736 - DNA, 19 bp, Artificial Sequence
  Description of Artificial Sequence: Synthetic primer
tgctcatccctgctcacca

SEQ ID NO: 6737 - DNA, 43 bp, Artificial Sequence
  Description of Artificial Sequence: Synthetic primer
  Description of Combined DNA/RNA Molecule: Synthetic primer
tgctcatccctgctcaccagctacctgctccctggcttgggct

SEQ ID NO: 6738 - DNA, 43 bp, Artificial Sequence
  Description of Artificial Sequence: Synthetic primer
  Description of Combined DNA/RNA Molecule: Synthetic primer
acgacgacgacgaacagaccatcagagctttgggagcacttta

SEQ ID NO: 6739 - DNA, 43 bp, Artificial Sequence
  Description of Artificial Sequence: Synthetic primer
  Description of Combined DNA/RNA Molecule: Synthetic primer
acgacgacgacgaacacttgggtgcatccagaccatcagagcc

SEQ ID NO: 6740 - DNA, 51 bp, Artificial Sequence
  Description of Artificial Sequence: Synthetic primer
  Description of Combined DNA/RNA Molecule: Synthetic primer
acgacgacgacttgacgaacataattcaaccctgctgctgctgacccttaa

SEQ ID NO: 6741 - DNA, 50 bp, Artificial Sequence
  Description of Artificial Sequence: Synthetic oligonucleotide
  Description of Combined DNA/RNA Molecule: Synthetic oligonucleotide
ttgcacccgcgacataaccctttgtttggcaacagtcagaagacacaaaa

SEQ ID NO: 6742 - DNA, 48 bp, Artificial Sequence
  Description of Artificial Sequence: Synthetic oligonucleotide
caaggagaggagtcctcccactgaacggtaattcactcgaacggagca

SEQ ID NO: 6743 - DNA, 26 bp, Artificial Sequence
  Description of Artificial Sequence: Synthetic probe
ttgaagacacaaggagaggagtcctc

SEQ ID NO: 6744 - DNA, 19 bp, Artificial Sequence
  Description of Artificial Sequence: Synthetic primer
ttgcacccgcgacataacc

SEQ ID NO: 6745 - DNA, 22 bp, Artificial Sequence
  Description of Artificial Sequence: Synthetic primer
tgctccgttcgagtgaattacc

SEQ ID NO: 6746 - DNA, 53 bp, Artificial Sequence
  Description of Artificial Sequence: Synthetic primer
  Description of Combined DNA/RNA Molecule: Synthetic primer
tgctccgttcgagtgaattaccgacccttagaacccccactgttcaatgggaa

SEQ ID NO: 6747 - DNA, 45 bp, Artificial Sequence
  Description of Artificial Sequence: Synthetic primer
  Description of Combined DNA/RNA Molecule: Synthetic primer
acgacgacgacgaaggttcagggttttaacctacagggcaaccct

SEQ ID NO: 6748 - DNA, 46 bp, Artificial Sequence
  Description of Artificial Sequence: Synthetic primer
  Description of Combined DNA/RNA Molecule: Synthetic primer
acgacgacgacgaaggaatgagcaggttcagggttttaaccuacaa

SEQ ID NO: 6749 - DNA, 58 bp, Artificial Sequence
  Description of Artificial Sequence: Synthetic primer
  Description of Combined DNA/RNA Molecule: Synthetic primer
acgacgacgacttgacgaacataatcttgggtgagtctctgtcttttgggttcaagct

SEQ ID NO: 6750 - DNA, 47 bp, Artificial Sequence
  Description of Artificial Sequence: Synthetic oligonucleotide
  Description of Combined DNA/RNA Molecule: Synthetic oligonucleotide
tccggcctttgacgataccccccaaaacccaacagcagaacauggag

SEQ ID NO: 6751 - DNA, 45 bp, Artificial Sequence
  Description of Artificial Sequence: Synthetic oligonucleotide
tgggaacctgtggcccacaaggcggtaattcactcgaacggagca

SEQ ID NO: 6752 - DNA, 27 bp, Artificial Sequence
  Description of Artificial Sequence: Synthetic probe
ttcagaacatgggaacctgtggcccac

SEQ ID NO: 6753 - DNA, 19 bp, Artificial Sequence
  Description of Artificial Sequence: Synthetic primer
tccggcctttgacgatacc

SEQ ID NO: 6754 - DNA, 22 bp, Artificial Sequence
  Description of Artificial Sequence: Synthetic primer
tgctccgttcgagtgaattacc

SEQ ID NO: 6755 - DNA, 54 bp, Artificial Sequence
  Description of Artificial Sequence: Synthetic primer
  Description of Combined DNA/RNA Molecule: Synthetic primer
tgctccgttcgagtgaattaccgtctctgtcttttgggttcaagcctatgcctc

SEQ ID NO: 6756 - DNA, 38 bp, Artificial Sequence
  Description of Artificial Sequence: Synthetic primer
  Description of Combined DNA/RNA Molecule: Synthetic primer
acgacgacgacgaagccactccagtccccagcactggt

SEQ ID NO: 6757 - DNA, 40 bp, Artificial Sequence
  Description of Artificial Sequence: Synthetic primer
  Description of Combined DNA/RNA Molecule: Synthetic primer
acgacgacgacgaactgcagttgccactccagtccccagt

SEQ ID NO: 6758 - DNA, 52 bp, Artificial Sequence
  Description of Artificial Sequence: Synthetic primer
  Description of Combined DNA/RNA Molecule: Synthetic primer
acgacgacgacttgacgaacataatgcattgctaggtgttgctgccactgga

SEQ ID NO: 6759 - DNA, 44 bp, Artificial Sequence
  Description of Artificial Sequence: Synthetic oligonucleotide
  Description of Combined DNA/RNA Molecule: Synthetic oligonucleotide
tcgcggaaagtcccagtaacgccagcaacccaaggcgcagcttg

SEQ ID NO: 6760 - DNA, 47 bp, Artificial Sequence
  Description of Artificial Sequence: Synthetic oligonucleotide
gctcacacctacctgcagccccacttcgttggcctgtaagcgttcca

SEQ ID NO: 6761 - DNA, 24 bp, Artificial Sequence
  Description of Artificial Sequence: Synthetic probe
ttaggcgcagctcacacctacctg

SEQ ID NO: 6762 - DNA, 20 bp, Artificial Sequence
  Description of Artificial Sequence: Synthetic primer
tcgcggaaagtcccagtaac

SEQ ID NO: 6763 - DNA, 20 bp, Artificial Sequence
  Description of Artificial Sequence: Synthetic primer
tggaacgcttacaggccaac

SEQ ID NO: 6764 - DNA, 46 bp, Artificial Sequence
  Description of Artificial Sequence: Synthetic primer
  Description of Combined DNA/RNA Molecule: Synthetic primer
tggaacgcttacaggccaacgtgttgctgccactgggaaatgggat

SEQ ID NO: 6765 - DNA, 42 bp, Artificial Sequence
  Description of Artificial Sequence: Synthetic primer
  Description of Combined DNA/RNA Molecule: Synthetic primer
acgacgacgacgaagcagcagaccaagtcactgagcagtgga

SEQ ID NO: 6766 - DNA, 43 bp, Artificial Sequence
  Description of Artificial Sequence: Synthetic primer
  Description of Combined DNA/RNA Molecule: Synthetic primer
acgacgacgacgaagcttgcagcagaccaagtcactgagcagc

SEQ ID NO: 6767 - DNA, 49 bp, Artificial Sequence
  Description of Artificial Sequence: Synthetic primer
  Description of Combined DNA/RNA Molecule: Synthetic primer
acgacgacgacttgacgaacataatgctgtgggactgtggtggcugtgc

SEQ ID NO: 6768 - DNA, 52 bp, Artificial Sequence
  Description of Artificial Sequence: Synthetic oligonucleotide
  Description of Combined DNA/RNA Molecule: Synthetic oligonucleotide
tgaacgctcaaacacgtgaacccagtgctaatgacagatgagccgcaucctg

SEQ ID NO: 6769 - DNA, 42 bp, Artificial Sequence
  Description of Artificial Sequence: Synthetic oligonucleotide
tcccagggtgcagggtctgcaggttggcctgtaagcgttcca

SEQ ID NO: 6770 - DNA, 20 bp, Artificial Sequence
  Description of Artificial Sequence: Synthetic probe
aaagccgcatcccagggtgc

SEQ ID NO: 6771 - DNA, 21 bp, Artificial Sequence
  Description of Artificial Sequence: Synthetic primer
tgaacgctcaaacacgtgaac

SEQ ID NO: 6772 - DNA, 20 bp, Artificial Sequence
  Description of Artificial Sequence: Synthetic primer
tggaacgcttacaggccaac

SEQ ID NO: 6773 - DNA, 46 bp, Artificial Sequence
  Description of Artificial Sequence: Synthetic primer
  Description of Combined DNA/RNA Molecule: Synthetic primer
tggaacgcttacaggccaacctgtgggactgtggtggctatgttta

SEQ ID NO: 6774 - DNA, 38 bp, Artificial Sequence
  Description of Artificial Sequence: Synthetic primer
  Description of Combined DNA/RNA Molecule: Synthetic primer
acgacgacgacgaaggagtccagagggctcccacctga

SEQ ID NO: 6775 - DNA, 40 bp, Artificial Sequence
  Description of Artificial Sequence: Synthetic primer
  Description of Combined DNA/RNA Molecule: Synthetic primer
acgacgacgacgaagggcataaagcacagcagggagtccg

SEQ ID NO: 6776 - DNA, 53 bp, Artificial Sequence
  Description of Artificial Sequence: Synthetic primer
  Description of Combined DNA/RNA Molecule: Synthetic primer
acgacgacgacttgacgaacataatgcttctgcagagtggagagtgcccccta

SEQ ID NO: 6777 - DNA, 46 bp, Artificial Sequence
  Description of Artificial Sequence: Synthetic oligonucleotide
  Description of Combined DNA/RNA Molecule: Synthetic oligonucleotide
tacacgtggatatctccgaccggagggctgtgtgagcaacaggctg

SEQ ID NO: 6778 - DNA, 41 bp, Artificial Sequence
  Description of Artificial Sequence: Synthetic oligonucleotide
ggccacagggcagcacagggggtgctagtcacacagttcca

SEQ ID NO: 6779 - DNA, 22 bp, Artificial Sequence
  Description of Artificial Sequence: Synthetic probe
aaagcaacaggccacagggcag

SEQ ID NO: 6780 - DNA, 21 bp, Artificial Sequence
  Description of Artificial Sequence: Synthetic primer
tacacgtggatatctccgacc

SEQ ID NO: 6781 - DNA, 21 bp, Artificial Sequence
  Description of Artificial Sequence: Synthetic primer
tggaactgtgtgactagcacc

SEQ ID NO: 6782 - DNA, 46 bp, Artificial Sequence
  Description of Artificial Sequence: Synthetic primer
  Description of Combined DNA/RNA Molecule: Synthetic primer
tggaactgtgtgactagcaccgagtggagagtgccccctatgctgt

SEQ ID NO: 6783 - DNA, 40 bp, Artificial Sequence
  Description of Artificial Sequence: Synthetic primer
  Description of Combined DNA/RNA Molecule: Synthetic primer
acgacgacgacgaagcagcaggaacagcacatccactaga

SEQ ID NO: 6784 - DNA, 43 bp, Artificial Sequence
  Description of Artificial Sequence: Synthetic primer
  Description of Combined DNA/RNA Molecule: Synthetic primer
acgacgacgacgaagcaggaacagcacatccactaggagcaga

SEQ ID NO: 6785 - DNA, 51 bp, Artificial Sequence
  Description of Artificial Sequence: Synthetic primer
  Description of Combined DNA/RNA Molecule: Synthetic primer
acgacgacgacttgacgaacataatccctactgctgggacttggccucctt

SEQ ID NO: 6786 - DNA, 44 bp, Artificial Sequence
  Description of Artificial Sequence: Synthetic oligonucleotide
  Description of Combined DNA/RNA Molecule: Synthetic oligonucleotide
tagcattcgagaacgcaccgcagggtgctcaagcagtcaccaat

SEQ ID NO: 6787 - DNA, 45 bp, Artificial Sequence
  Description of Artificial Sequence: Synthetic oligonucleotide
ccagcagctgcatgccaaagccacggtgctagtcacacagttcca

SEQ ID NO: 6788 - DNA, 24 bp, Artificial Sequence
  Description of Artificial Sequence: Synthetic probe
ttgcagtcaccagcagctgcatgc

SEQ ID NO: 6789 - DNA, 19 bp, Artificial Sequence
  Description of Artificial Sequence: Synthetic primer
tagcattcgagaacgcacc

SEQ ID NO: 6790 - DNA, 21 bp, Artificial Sequence
  Description of Artificial Sequence: Synthetic primer
tggaactgtgtgactagcacc

SEQ ID NO: 6791 - DNA, 49 bp, Artificial Sequence
  Description of Artificial Sequence: Synthetic primer
  Description of Combined DNA/RNA Molecule: Synthetic primer
tggaactgtgtgactagcaccgacttggcctcctctgtggctctggcac

SEQ ID NO: 6792 - DNA, 45 bp, Artificial Sequence
  Description of Artificial Sequence: Synthetic primer
  Description of Combined DNA/RNA Molecule: Synthetic primer
acgacgacgacgaaagttttgagctcttagcttggtgccagggct

SEQ ID NO: 6793 - DNA, 45 bp, Artificial Sequence
  Description of Artificial Sequence: Synthetic primer
  Description of Combined DNA/RNA Molecule: Synthetic primer
acgacgacgacgaacacacccacttcaaggagttttgagcucttg

SEQ ID NO: 6794 - DNA, 52 bp, Artificial Sequence
  Description of Artificial Sequence: Synthetic primer
  Description of Combined DNA/RNA Molecule: Synthetic primer
acgacgacgacttgacgaacataatccctgagctggtgcactgtgaagttgt

SEQ ID NO: 6795 - DNA, 52 bp, Artificial Sequence
  Description of Artificial Sequence: Synthetic oligonucleotide
  Description of Combined DNA/RNA Molecule: Synthetic oligonucleotide
tcgatggtcaatgagcttcacacacccagcactagatgaagtgcccauttgt

SEQ ID NO: 6796 - DNA, 58 bp, Artificial Sequence
  Description of Artificial Sequence: Synthetic oligonucleotide
tttactcagcctaagccacagtgactcaaaggtgagtgttacgtgatctccctctcca

SEQ ID NO: 6797 - DNA, 30 bp, Artificial Sequence
  Description of Artificial Sequence: Synthetic probe
ttgtgcccatttactcagcctaagccacag

SEQ ID NO: 6798 - DNA, 22 bp, Artificial Sequence
  Description of Artificial Sequence: Synthetic primer
tcgatggtcaatgagcttcaca

SEQ ID NO: 6799 - DNA, 22 bp, Artificial Sequence
  Description of Artificial Sequence: Synthetic primer
tggagagggagatcacgtaaca

SEQ ID NO: 6800 - DNA, 55 bp, Artificial Sequence
  Description of Artificial Sequence: Synthetic primer
  Description of Combined DNA/RNA Molecule: Synthetic primer
tggagagggagatcacgtaacatgcactgtgaagttgcattctcacctctgagtt

SEQ ID NO: 6801 - DNA, 38 bp, Artificial Sequence
  Description of Artificial Sequence: Synthetic primer
  Description of Combined DNA/RNA Molecule: Synthetic primer
acgacgacgacgaagaggagggcagtgggcacaugtga

SEQ ID NO: 6802 - DNA, 41 bp, Artificial Sequence
  Description of Artificial Sequence: Synthetic primer
  Description of Combined DNA/RNA Molecule: Synthetic primer
acgacgacgacgaacagttcagcagaggccagaggagggcg

SEQ ID NO: 6803 - DNA, 51 bp, Artificial Sequence
  Description of Artificial Sequence: Synthetic primer
  Description of Combined DNA/RNA Molecule: Synthetic primer
acgacgacgacttgacgaacataatccctgtgcctggttgtagtgcugtgc

SEQ ID NO: 6804 - DNA, 53 bp, Artificial Sequence
  Description of Artificial Sequence: Synthetic oligonucleotide
  Description of Combined DNA/RNA Molecule: Synthetic oligonucleotide
tcgatggtcaatgagcttcacacctgacagccatctgcctgttctgcagctgt

SEQ ID NO: 6805 - DNA, 50 bp, Artificial Sequence
  Description of Artificial Sequence: Synthetic oligonucleotide
gctcagccatctacacctacctgcagcctgttacgtgatctccctctcca

SEQ ID NO: 6806 - DNA, 29 bp, Artificial Sequence
  Description of Artificial Sequence: Synthetic probe
aattctgcagctcagccatctacacctac

SEQ ID NO: 6807 - DNA, 22 bp, Artificial Sequence
  Description of Artificial Sequence: Synthetic primer
tcgatggtcaatgagcttcaca

SEQ ID NO: 6808 - DNA, 22 bp, Artificial Sequence
  Description of Artificial Sequence: Synthetic primer
tggagagggagatcacgtaaca

SEQ ID NO: 6809 - DNA, 51 bp, Artificial Sequence
  Description of Artificial Sequence: Synthetic primer
  Description of Combined DNA/RNA Molecule: Synthetic primer
tggagagggagatcacgtaacactgtgcctggttgtagtgctgtatgggcc

SEQ ID NO: 6810 - DNA, 40 bp, Artificial Sequence
  Description of Artificial Sequence: Synthetic primer
  Description of Combined DNA/RNA Molecule: Synthetic primer
acgacgacgacgaagagccatagtcagaggcaccaggtga

SEQ ID NO: 6811 - DNA, 41 bp, Artificial Sequence
  Description of Artificial Sequence: Synthetic primer
  Description of Combined DNA/RNA Molecule: Synthetic primer
acgacgacgacgaagctgaggctgggagccatagtcaggga

SEQ ID NO: 6812 - DNA, 52 bp, Artificial Sequence
  Description of Artificial Sequence: Synthetic primer
  Description of Combined DNA/RNA Molecule: Synthetic primer
acgacgacgacttgacgaacataatgaatctgcccagggcctgttcccctgt

SEQ ID NO: 6813 - DNA, 46 bp, Artificial Sequence
  Description of Artificial Sequence: Synthetic oligonucleotide
  Description of Combined DNA/RNA Molecule: Synthetic oligonucleotide
tctcgggaccacaatacgaactgggctttggcagcaggccaaccca

SEQ ID NO: 6814 - DNA, 43 bp, Artificial Sequence
  Description of Artificial Sequence: Synthetic oligonucleotide
acctgcctttcaggtgccagagggttacgctaagctggtgcca

SEQ ID NO: 6815 - DNA, 25 bp, Artificial Sequence
  Description of Artificial Sequence: Synthetic probe
ttcaggccaacctgcctttcaggtg

SEQ ID NO: 6816 - DNA, 21 bp, Artificial Sequence
  Description of Artificial Sequence: Synthetic primer
tctcgggaccacaatacgaac

SEQ ID NO: 6817 - DNA, 20 bp, Artificial Sequence
  Description of Artificial Sequence: Synthetic primer
tggcaccagcttagcgtaac

SEQ ID NO: 6818 - DNA, 44 bp, Artificial Sequence
  Description of Artificial Sequence: Synthetic primer
  Description of Combined DNA/RNA Molecule: Synthetic primer
tggcaccagcttagcgtaaccccctgctcccaaacccttggcat

SEQ ID NO: 6819 - DNA, 38 bp, Artificial Sequence
  Description of Artificial Sequence: Synthetic primer
  Description of Combined DNA/RNA Molecule: Synthetic primer
acgacgacgacgaaggaggacaccagcacagcaggtgc

SEQ ID NO: 6820 - DNA, 39 bp, Artificial Sequence
  Description of Artificial Sequence: Synthetic primer
  Description of Combined DNA/RNA Molecule: Synthetic primer
acgacgacgacgaagggacaccagcacagcaggtgtgcg

SEQ ID NO: 6821 - DNA, 56 bp, Artificial Sequence
  Description of Artificial Sequence: Synthetic primer
  Description of Combined DNA/RNA Molecule: Synthetic primer
acgacgacgacttgacgaacataatggagacctttgctgtgttctgtgtgtcctgc

SEQ ID NO: 6822 - DNA, 46 bp, Artificial Sequence
  Description of Artificial Sequence: Synthetic oligonucleotide
  Description of Combined DNA/RNA Molecule: Synthetic oligonucleotide
ttgctgtgcgcggtagaacgtgcacccaagtgtcctcaacagcaat

SEQ ID NO: 6823 - DNA, 49 bp, Artificial Sequence
  Description of Artificial Sequence: Synthetic oligonucleotide
gcagcacacctcatgtaagcctgcacagggttacgctaagctggtgcca

SEQ ID NO: 6824 - DNA, 30 bp, Artificial Sequence
  Description of Artificial Sequence: Synthetic probe
aactcaacagcagcacacctcatgtaagcc

SEQ ID NO: 6825 - DNA, 19 bp, Artificial Sequence
  Description of Artificial Sequence: Synthetic primer
ttgctgtgcgcggtagaac

SEQ ID NO: 6826 - DNA, 20 bp, Artificial Sequence
  Description of Artificial Sequence: Synthetic primer
tggcaccagcttagcgtaac

SEQ ID NO: 6827 - DNA, 51 bp, Artificial Sequence
  Description of Artificial Sequence: Synthetic primer
  Description of Combined DNA/RNA Molecule: Synthetic primer
tggcaccagcttagcgtaaccctttgctgtgttctgtgtgtcctatgcaga

SEQ ID NO: 6828 - DNA, 43 bp, Artificial Sequence
  Description of Artificial Sequence: Synthetic primer
  Description of Combined DNA/RNA Molecule: Synthetic primer
acgacgacgacgaacaaagacctcataggcaggcctcagggaa

SEQ ID NO: 6829 - DNA, 45 bp, Artificial Sequence
  Description of Artificial Sequence: Synthetic primer
  Description of Combined DNA/RNA Molecule: Synthetic primer
acgacgacgacgaactgaaccaaagacctcataggcaggcctcaa

SEQ ID NO: 6830 - DNA, 54 bp, Artificial Sequence
  Description of Artificial Sequence: Synthetic primer
  Description of Combined DNA/RNA Molecule: Synthetic primer
acgacgacgacttgacgaacataatggagaatgaggtgtgtgagctgcagctgt

SEQ ID NO: 6831 - DNA, 45 bp, Artificial Sequence
  Description of Artificial Sequence: Synthetic oligonucleotide
  Description of Combined DNA/RNA Molecule: Synthetic oligonucleotide
tctcgattacgctccgcacgggatgatgccattggcaacagccga

SEQ ID NO: 6832 - DNA, 42 bp, Artificial Sequence
  Description of Artificial Sequence: Synthetic oligonucleotide
gccagcaccagcccctcagcgtgtgtagcttagacatggcca

SEQ ID NO: 6833 - DNA, 22 bp, Artificial Sequence
  Description of Artificial Sequence: Synthetic probe
aaggcaacagccagcaccagcc

SEQ ID NO: 6834 - DNA, 19 bp, Artificial Sequence
  Description of Artificial Sequence: Synthetic primer
tctcgattacgctccgcac

SEQ ID NO: 6835 - DNA, 22 bp, Artificial Sequence
  Description of Artificial Sequence: Synthetic primer
tggccatgtctaagctacacac

SEQ ID NO: 6836 - DNA, 49 bp, Artificial Sequence
  Description of Artificial Sequence: Synthetic primer
  Description of Combined DNA/RNA Molecule: Synthetic primer
tggccatgtctaagctacacacgcagctgctctatggcactgttgagga

SEQ ID NO: 6837 - DNA, 39 bp, Artificial Sequence
  Description of Artificial Sequence: Synthetic primer
  Description of Combined DNA/RNA Molecule: Synthetic primer
acgacgacgacgaacaaggctgcatgggccagcaaggga

SEQ ID NO: 6838 - DNA, 40 bp, Artificial Sequence
  Description of Artificial Sequence: Synthetic primer
  Description of Combined DNA/RNA Molecule: Synthetic primer
acgacgacgacgaaccacaagaggcaggacaaggcugcac

SEQ ID NO: 6839 - DNA, 53 bp, Artificial Sequence
  Description of Artificial Sequence: Synthetic primer
  Description of Combined DNA/RNA Molecule: Synthetic primer
acgacgacgacttgacgaacataatgcttgtgtggtgtctcctggctccctga

SEQ ID NO: 6840 - DNA, 50 bp, Artificial Sequence
  Description of Artificial Sequence: Synthetic oligonucleotide
  Description of Combined DNA/RNA Molecule: Synthetic oligonucleotide
tcacagagacttgccgatcaccaacaccaagccagagtgagcgcagggtt

SEQ ID NO: 6841 - DNA, 41 bp, Artificial Sequence
  Description of Artificial Sequence: Synthetic oligonucleotide
gggcctggagcacagagccgtgtgtagcttagacatggcca

SEQ ID NO: 6842 - DNA, 19 bp, Artificial Sequence
  Description of Artificial Sequence: Synthetic probe
aagagcgcagggcctggag

SEQ ID NO: 6843 - DNA, 21 bp, Artificial Sequence
  Description of Artificial Sequence: Synthetic primer
tcacagagacttgccgatcac

SEQ ID NO: 6844 - DNA, 22 bp, Artificial Sequence
  Description of Artificial Sequence: Synthetic primer
tggccatgtctaagctacacac

SEQ ID NO: 6845 - DNA, 46 bp, Artificial Sequence
  Description of Artificial Sequence: Synthetic primer
  Description of Combined DNA/RNA Molecule: Synthetic primer
tggccatgtctaagctacacacctccctgggtgggctctatgccct

SEQ ID NO: 6846 - DNA, 41 bp, Artificial Sequence
  Description of Artificial Sequence: Synthetic primer
  Description of Combined DNA/RNA Molecule: Synthetic primer
acgacgacgacgaacttctcaactccccagccaccacctct

SEQ ID NO: 6847 - DNA, 49 bp, Artificial Sequence
  Description of Artificial Sequence: Synthetic primer
  Description of Combined DNA/RNA Molecule: Synthetic primer
acgacgacgacgaactggagcactagtacttgcttctcaactccccagt

SEQ ID NO: 6848 - DNA, 59 bp, Artificial Sequence
  Description of Artificial Sequence: Synthetic primer
  Description of Combined DNA/RNA Molecule: Synthetic primer
acgacgacgacttgacgaacataattgctagggtcagactcaaagatggactgaggtga

SEQ ID NO: 6849 - DNA, 46 bp, Artificial Sequence
  Description of Artificial Sequence: Synthetic oligonucleotide
  Description of Combined DNA/RNA Molecule: Synthetic oligonucleotide
tcacagagacttgccgatcaccagccaccccagggatttcaccatt

SEQ ID NO: 6850 - DNA, 49 bp, Artificial Sequence
  Description of Artificial Sequence: Synthetic oligonucleotide
ccaccaaacacacacatcccaggtggggtgtgtagcttagacatggcca

SEQ ID NO: 6851 - DNA, 31 bp, Artificial Sequence
  Description of Artificial Sequence: Synthetic probe
ttgatttcaccaccaaacacacacatcccag

SEQ ID NO: 6852 - DNA, 21 bp, Artificial Sequence
  Description of Artificial Sequence: Synthetic primer
tcacagagacttgccgatcac

SEQ ID NO: 6853 - DNA, 22 bp, Artificial Sequence
  Description of Artificial Sequence: Synthetic primer
tggccatgtctaagctacacac

SEQ ID NO: 6854 - DNA, 54 bp, Artificial Sequence
  Description of Artificial Sequence: Synthetic primer
  Description of Combined DNA/RNA Molecule: Synthetic primer
tggccatgtctaagctacacacgggtcagactcaaagatggactgagatgggta

SEQ ID NO: 6855 - DNA, 38 bp, Artificial Sequence; identical to SEQ ID NO: 6801
  Description of Artificial Sequence: Synthetic primer
  Description of Combined DNA/RNA Molecule: Synthetic primer

SEQ ID NO: 6856 - DNA, 38 bp, Artificial Sequence
  Description of Artificial Sequence: Synthetic primer
  Description of Combined DNA/RNA Molecule: Synthetic primer
acgacgacgacgaaccagaggagggcagtgggcacata

SEQ ID NO: 6857 - DNA, 51 bp, Artificial Sequence; identical to SEQ ID NO: 6803
  Description of Artificial Sequence: Synthetic primer
  Description of Combined DNA/RNA Molecule: Synthetic primer

SEQ ID NO: 6858 - DNA, 49 bp, Artificial Sequence
  Description of Artificial Sequence: Synthetic oligonucleotide
  Description of Combined DNA/RNA Molecule: Synthetic oligonucleotide
ttcgtccctgcacgctaacctgacagccatctgcctgttctgcagcttg

SEQ ID NO: 6859 - DNA, 48 bp, Artificial Sequence
  Description of Artificial Sequence: Synthetic oligonucleotide
gctcagccatctacacctacctgcagccgttccatcaccgttaggcca

SEQ ID NO: 6860 - DNA, 30 bp, Artificial Sequence
  Description of Artificial Sequence: Synthetic probe
aattctgcagctcagccatctacacctacc

SEQ ID NO: 6861 - DNA, 19 bp, Artificial Sequence
  Description of Artificial Sequence: Synthetic primer
ttcgtccctgcacgctaac

SEQ ID NO: 6862 - DNA, 20 bp, Artificial Sequence
  Description of Artificial Sequence: Synthetic primer
tggcctaacggtgatggaac

SEQ ID NO: 6863 - DNA, 48 bp, Artificial Sequence
  Description of Artificial Sequence: Synthetic primer
  Description of Combined DNA/RNA Molecule: Synthetic primer
tggcctaacggtgatggaactgtgcctggttgtagtgctgtatgggcc

SEQ ID NO: 6864 - DNA, 38 bp, Artificial Sequence; identical to SEQ ID NO: 5190
  Description of Artificial Sequence: Synthetic primer
  Description of Combined DNA/RNA Molecule: Synthetic primer

SEQ ID NO: 6865 - DNA, 40 bp, Artificial Sequence; identical to SEQ ID NO: 5191
  Description of Artificial Sequence: Synthetic primer
  Description of Combined DNA/RNA Molecule: Synthetic primer

SEQ ID NO: 6866 - DNA, 54 bp, Artificial Sequence; identical to SEQ ID NO: 5192
  Description of Artificial Sequence: Synthetic primer
  Description of Combined DNA/RNA Molecule: Synthetic primer

SEQ ID NO: 6867 - DNA, 45 bp, Artificial Sequence; identical to SEQ ID NO: 5193
  Description of Artificial Sequence: Synthetic oligonucleotide
  Description of Combined DNA/RNA Molecule: Synthetic oligonucleotide

SEQ ID NO: 6868 - DNA, 42 bp, Artificial Sequence; identical to SEQ ID NO: 5194
  Description of Artificial Sequence: Synthetic oligonucleotide

SEQ ID NO: 6869 - DNA, 23 bp, Artificial Sequence
  Description of Artificial Sequence: Synthetic probe
ttcaagacaggaggagccagggc

SEQ ID NO: 6870 - DNA, 21 bp, Artificial Sequence
  Description of Artificial Sequence: Synthetic primer
tgtcgcccggtagcaataaac

SEQ ID NO: 6871 - DNA, 22 bp, Artificial Sequence
  Description of Artificial Sequence: Synthetic primer
tgaatgcaaagatcgcggaaac

SEQ ID NO: 6872 - DNA, 43 bp, Artificial Sequence; identical to SEQ ID NO: 5198
  Description of Artificial Sequence: Synthetic primer
  Description of Combined DNA/RNA Molecule: Synthetic primer

SEQ ID NO: 6873 - DNA, 37 bp, Artificial Sequence; identical to SEQ ID NO: 5324
  Description of Artificial Sequence: Synthetic primer
  Description of Combined DNA/RNA Molecule: Synthetic primer

SEQ ID NO: 6874 - DNA, 39 bp, Artificial Sequence; identical to SEQ ID NO: 5325
  Description of Artificial Sequence: Synthetic primer
  Description of Combined DNA/RNA Molecule: Synthetic primer

SEQ ID NO: 6875 - DNA, 52 bp, Artificial Sequence; identical to SEQ ID NO: 5326
  Description of Artificial Sequence: Synthetic primer
  Description of Combined DNA/RNA Molecule: Synthetic primer

SEQ ID NO: 6876 - DNA, 42 bp, Artificial Sequence; identical to SEQ ID NO: 5327
  Description of Artificial Sequence: Synthetic oligonucleotide
  Description of Combined DNA/RNA Molecule: Synthetic oligonucleotide

SEQ ID NO: 6877 - DNA, 47 bp, Artificial Sequence; identical to SEQ ID NO: 5328
  Description of Artificial Sequence: Synthetic oligonucleotide

SEQ ID NO: 6878 - DNA, 26 bp, Artificial Sequence
  Description of Artificial Sequence: Synthetic probe
ttaggctcacacagcactgtctgcag

SEQ ID NO: 6879 - DNA, 19 bp, Artificial Sequence
  Description of Artificial Sequence: Synthetic primer
tgcttacccacgatgcacc

SEQ ID NO: 6880 - DNA, 20 bp, Artificial Sequence
  Description of Artificial Sequence: Synthetic primer
tgcgagcaagtcatacgacc

SEQ ID NO: 6881 - DNA, 56 bp, Artificial Sequence; identical to SEQ ID NO: 5332
  Description of Artificial Sequence: Synthetic primer
  Description of Combined DNA/RNA Molecule: Synthetic primer

SEQ ID NO: 6882 - DNA, 41 bp, Artificial Sequence; identical to SEQ ID NO: 5387
  Description of Artificial Sequence: Synthetic primer
  Description of Combined DNA/RNA Molecule: Synthetic primer

SEQ ID NO: 6883 - DNA, 42 bp, Artificial Sequence; identical to SEQ ID NO: 5388
  Description of Artificial Sequence: Synthetic primer
  Description of Combined DNA/RNA Molecule: Synthetic primer

SEQ ID NO: 6884 - DNA, 49 bp, Artificial Sequence; identical to SEQ ID NO: 5389
  Description of Artificial Sequence: Synthetic primer
  Description of Combined DNA/RNA Molecule: Synthetic primer

SEQ ID NO: 6885 - DNA, 46 bp, Artificial Sequence; identical to SEQ ID NO: 5390
  Description of Artificial Sequence: Synthetic oligonucleotide
  Description of Combined DNA/RNA Molecule: Synthetic oligonucleotide

SEQ ID NO: 6886 - DNA, 49 bp, Artificial Sequence; identical to SEQ ID NO: 5391
  Description of Artificial Sequence: Synthetic oligonucleotide

SEQ ID NO: 6887 - DNA, 29 bp, Artificial Sequence
  Description of Artificial Sequence: Synthetic probe
ttaggaacaacaggcaacattggtaggga

SEQ ID NO: 6888 - DNA, 21 bp, Artificial Sequence
  Description of Artificial Sequence: Synthetic primer
tggatcgagacggaatgcaac

SEQ ID NO: 6889 - DNA, 22 bp, Artificial Sequence
  Description of Artificial Sequence: Synthetic primer
tgcgggtatcaatcagggaaac

SEQ ID NO: 6890 - DNA, 50 bp, Artificial Sequence; identical to SEQ ID NO: 5395
  Description of Artificial Sequence: Synthetic primer
  Description of Combined DNA/RNA Molecule: Synthetic primer

SEQ ID NO: 6891 - DNA, 35 bp, Artificial Sequence; identical to SEQ ID NO: 5549
  Description of Artificial Sequence: Synthetic primer
  Description of Combined DNA/RNA Molecule: Synthetic primer

SEQ ID NO: 6892 - DNA, 38 bp, Artificial Sequence; identical to SEQ ID NO: 5550
  Description of Artificial Sequence: Synthetic primer
  Description of Combined DNA/RNA Molecule: Synthetic primer

SEQ ID NO: 6893 - DNA, 58 bp, Artificial Sequence; identical to SEQ ID NO: 5551
  Description of Artificial Sequence: Synthetic primer
  Description of Combined DNA/RNA Molecule: Synthetic primer

SEQ ID NO: 6894 - DNA, 48 bp, Artificial Sequence; identical to SEQ ID NO: 5552
  Description of Artificial Sequence: Synthetic oligonucleotide
  Description of Combined DNA/RNA Molecule: Synthetic oligonucleotide

SEQ ID NO: 6895 - DNA, 53 bp, Artificial Sequence; identical to SEQ ID NO: 5553
  Description of Artificial Sequence: Synthetic oligonucleotide

SEQ ID NO: 6896 - DNA, 29 bp, Artificial Sequence
  Description of Artificial Sequence: Synthetic probe
aacaccgcactggagtaccctgcacataa

SEQ ID NO: 6897 - DNA, 19 bp, Artificial Sequence
  Description of Artificial Sequence: Synthetic primer
ttttcggcatccgcttcca

SEQ ID NO: 6898 - DNA, 21 bp, Artificial Sequence
  Description of Artificial Sequence: Synthetic primer
tggcctgtcctctgttaacca

SEQ ID NO: 6899 - DNA, 53 bp, Artificial Sequence; identical to SEQ ID NO: 5557
  Description of Artificial Sequence: Synthetic primer
  Description of Combined DNA/RNA Molecule: Synthetic primer

SEQ ID NO: 6900 - DNA, 41 bp, Artificial Sequence; identical to SEQ ID NO: 5593
  Description of Artificial Sequence: Synthetic primer
  Description of Combined DNA/RNA Molecule: Synthetic primer

SEQ ID NO: 6901 - DNA, 38 bp, Artificial Sequence; identical to SEQ ID NO: 5594
  Description of Artificial Sequence: Synthetic primer
  Description of Combined DNA/RNA Molecule: Synthetic primer

SEQ ID NO: 6902 - DNA, 53 bp, Artificial Sequence; identical to SEQ ID NO: 5595
  Description of Artificial Sequence: Synthetic primer
  Description of Combined DNA/RNA Molecule: Synthetic primer

SEQ ID NO: 6903 - DNA, 46 bp, Artificial Sequence; identical to SEQ ID NO: 5596
  Description of Artificial Sequence: Synthetic oligonucleotide
  Description of Combined DNA/RNA Molecule: Synthetic oligonucleotide

SEQ ID NO: 6904 - DNA, 44 bp, Artificial Sequence; identical to SEQ ID NO: 5597
  Description of Artificial Sequence: Synthetic oligonucleotide

SEQ ID NO: 6905 - DNA, 23 bp, Artificial Sequence
  Description of Artificial Sequence: Synthetic probe
ttctccgcaccccagctccagtc

SEQ ID NO: 6906 - DNA, 22 bp, Artificial Sequence
  Description of Artificial Sequence: Synthetic primer
tccaaacgattaggagcgtcaa

SEQ ID NO: 6907 - DNA, 21 bp, Artificial Sequence
  Description of Artificial Sequence: Synthetic primer
tgggcgtatacctctgtccaa

SEQ ID NO: 6908 - DNA, 48 bp, Artificial Sequence; identical to SEQ ID NO: 5601
  Description of Artificial Sequence: Synthetic primer
  Description of Combined DNA/RNA Molecule: Synthetic primer

SEQ ID NO: 6909 - DNA, 41 bp, Artificial Sequence; identical to SEQ ID NO: 5782
  Description of Artificial Sequence: Synthetic primer
  Description of Combined DNA/RNA Molecule: Synthetic primer

SEQ ID NO: 6910 - DNA, 39 bp, Artificial Sequence; identical to SEQ ID NO: 5783
  Description of Artificial Sequence: Synthetic primer
  Description of Combined DNA/RNA Molecule: Synthetic primer

SEQ ID NO: 6911 - DNA, 51 bp, Artificial Sequence; identical to SEQ ID NO: 5784
  Description of Artificial Sequence: Synthetic primer
  Description of Combined DNA/RNA Molecule: Synthetic primer

SEQ ID NO: 6912 - DNA, 50 bp, Artificial Sequence; identical to SEQ ID NO: 5785
  Description of Artificial Sequence: Synthetic oligonucleotide
  Description of Combined DNA/RNA Molecule: Synthetic oligonucleotide

SEQ ID NO: 6913 - DNA, 51 bp, Artificial Sequence; identical to SEQ ID NO: 5786
  Description of Artificial Sequence: Synthetic oligonucleotide

SEQ ID NO: 6914 - DNA, 24 bp, Artificial Sequence
  Description of Artificial Sequence: Synthetic probe
aagaccccaggttctccccagcac

SEQ ID NO: 6915 - DNA, 22 bp, Artificial Sequence
  Description of Artificial Sequence: Synthetic primer
tggataaactaagtccgcccac

SEQ ID NO: 6916 - DNA, 21 bp, Artificial Sequence
  Description of Artificial Sequence: Synthetic primer
tgttagacgtcgctcagtcac

SEQ ID NO: 6917 - DNA, 48 bp, Artificial Sequence; identical to SEQ ID NO: 5790
  Description of Artificial Sequence: Synthetic primer
  Description of Combined DNA/RNA Molecule: Synthetic primer

SEQ ID NO: 6918 - DNA, 41 bp, Artificial Sequence; identical to SEQ ID NO: 6066
  Description of Artificial Sequence: Synthetic primer
  Description of Combined DNA/RNA Molecule: Synthetic primer

SEQ ID NO: 6919 - DNA, 42 bp, Artificial Sequence; identical to SEQ ID NO: 6067
  Description of Artificial Sequence: Synthetic primer
  Description of Combined DNA/RNA Molecule: Synthetic primer

SEQ ID NO: 6920 - DNA, 54 bp, Artificial Sequence; identical to SEQ ID NO: 6068
  Description of Artificial Sequence: Synthetic primer
  Description of Combined DNA/RNA Molecule: Synthetic primer

SEQ ID NO: 6921 - DNA, 49 bp, Artificial Sequence; identical to SEQ ID NO: 6069
  Description of Artificial Sequence: Synthetic oligonucleotide
  Description of Combined DNA/RNA Molecule: Synthetic oligonucleotide

SEQ ID NO: 6922 - DNA, 56 bp, Artificial Sequence; identical to SEQ ID NO: 6070
  Description of Artificial Sequence: Synthetic oligonucleotide

SEQ ID NO: 6923 - DNA, 32 bp, Artificial Sequence; identical to SEQ ID NO: 6071
  Description of Artificial Sequence: Synthetic probe

SEQ ID NO: 6924 - DNA, 20 bp, Artificial Sequence
  Description of Artificial Sequence: Synthetic primer
tttcaggccctaaccaccac

SEQ ID NO: 6925 - DNA, 20 bp, Artificial Sequence
  Description of Artificial Sequence: Synthetic primer
tccatcgcccttaatcccac

SEQ ID NO: 6926 - DNA, 55 bp, Artificial Sequence; identical to SEQ ID NO: 6074
  Description of Artificial Sequence: Synthetic primer
  Description of Combined DNA/RNA Molecule: Synthetic primer

SEQ ID NO: 6927 - DNA, 36 bp, Artificial Sequence; identical to SEQ ID NO: 5531
  Description of Artificial Sequence: Synthetic primer
  Description of Combined DNA/RNA Molecule: Synthetic primer

SEQ ID NO: 6928 - DNA, 37 bp, Artificial Sequence
  Description of Artificial Sequence: Synthetic primer
  Description of Combined DNA/RNA Molecule: Synthetic primer
acgacgacgacgaatggcacagccagaggcaaggcat

SEQ ID NO: 6929 - DNA, 58 bp, Artificial Sequence
  Description of Artificial Sequence: Synthetic primer
  Description of Combined DNA/RNA Molecule: Synthetic primer
acgacgacgacttgacgaacataatctgtgggtagtaagattcagagcctggagccta

SEQ ID NO: 6930 - DNA, 53 bp, Artificial Sequence
  Description of Artificial Sequence: Synthetic oligonucleotide
  Description of Combined DNA/RNA Molecule: Synthetic oligonucleotide
tgatgctggcaaaccctagaacccaatagggctgagtgacacaagccagcctt

SEQ ID NO: 6931 - DNA, 42 bp, Artificial Sequence
  Description of Artificial Sequence: Synthetic oligonucleotide
gccccaagccaccctccacacagttccatcaccgttaggcca

SEQ ID NO: 6932 - DNA, 22 bp, Artificial Sequence
  Description of Artificial Sequence: Synthetic probe
ttcaagccagccccaagccacc

SEQ ID NO: 6933 - DNA, 22 bp, Artificial Sequence
  Description of Artificial Sequence: Synthetic primer
tgatgctggcaaaccctagaac

SEQ ID NO: 6934 - DNA, 20 bp, Artificial Sequence
  Description of Artificial Sequence: Synthetic primer
tggcctaacggtgatggaac

SEQ ID NO: 6935 - DNA, 44 bp, Artificial Sequence
  Description of Artificial Sequence: Synthetic primer
  Description of Combined DNA/RNA Molecule: Synthetic primer
tggcctaacggtgatggaacgcctggagcctgggtgtatggaga

SEQ ID NO: 6936 - DNA, 48 bp, Artificial Sequence
  Description of Artificial Sequence: Synthetic primer
  Description of Combined DNA/RNA Molecule: Synthetic primer
acgacgacgacgaacaaggcctacagagcagttaccttctacagcaac

SEQ ID NO: 6937 - DNA, 42 bp, Artificial Sequence
  Description of Artificial Sequence: Synthetic primer
  Description of Combined DNA/RNA Molecule: Synthetic primer
acgacgacgacgaacagaacccaaggcctacagagcagttat

SEQ ID NO: 6938 - DNA, 55 bp, Artificial Sequence
  Description of Artificial Sequence: Synthetic primer
  Description of Combined DNA/RNA Molecule: Synthetic primer
acgacgacgacttgacgaacataatctcagggccattttcccatggagtaagaat

SEQ ID NO: 6939 - DNA, 54 bp, Artificial Sequence
  Description of Artificial Sequence: Synthetic oligonucleotide
  Description of Combined DNA/RNA Molecule: Synthetic oligonucleotide
tgatgctggcaaaccctagaaccaatttcaagggtggatggtgcaaacaccatc

SEQ ID NO: 6940 - DNA, 44 bp, Artificial Sequence
  Description of Artificial Sequence: Synthetic oligonucleotide
ccactgaggcagctggcattctgggttccatcaccgttaggcca

SEQ ID NO: 6941 - DNA, 24 bp, Artificial Sequence
  Description of Artificial Sequence: Synthetic probe
aagcaaacaccactgaggcagctg

SEQ ID NO: 6942 - DNA, 22 bp, Artificial Sequence
  Description of Artificial Sequence: Synthetic primer
tgatgctggcaaaccctagaac

SEQ ID NO: 6943 - DNA, 20 bp, Artificial Sequence
  Description of Artificial Sequence: Synthetic primer
tggcctaacggtgatggaac

SEQ ID NO: 6944 - DNA, 55 bp, Artificial Sequence
  Description of Artificial Sequence: Synthetic primer
  Description of Combined DNA/RNA Molecule: Synthetic primer
tggcctaacggtgatggaacgccattttcccatggagtaagaaccagagtgccaa

SEQ ID NO: 6945 - DNA, 38 bp, Artificial Sequence
  Description of Artificial Sequence: Synthetic primer
  Description of Combined DNA/RNA Molecule: Synthetic primer
acgacgacgacgaacagcagcagcacctgcacaggcaa

SEQ ID NO: 6946 - DNA, 37 bp, Artificial Sequence
  Description of Artificial Sequence: Synthetic primer
  Description of Combined DNA/RNA Molecule: Synthetic primer
acgacgacgacgaagcagcacctgcacaggcaggcaa

SEQ ID NO: 6947 - DNA, 54 bp, Artificial Sequence
  Description of Artificial Sequence: Synthetic primer
  Description of Combined DNA/RNA Molecule: Synthetic primer
acgacgacgacttgacgaacataatggagggtggtgatgaggttggagagggac

SEQ ID NO: 6948 - DNA, 47 bp, Artificial Sequence
  Description of Artificial Sequence: Synthetic oligonucleotide
  Description of Combined DNA/RNA Molecule: Synthetic oligonucleotide
tccgggtatacactgtcccacaggaggtggaggagagaatcacaggg

SEQ ID NO: 6949 - DNA, 50 bp, Artificial Sequence
  Description of Artificial Sequence: Synthetic oligonucleotide
cagaatgcacattaagcctgggctccctgtggttaacagaggacaggcca

SEQ ID NO: 6950 - DNA, 31 bp, Artificial Sequence
  Description of Artificial Sequence: Synthetic probe
ttagaatcacagaatgcacattaagcctggg

SEQ ID NO: 6951 - DNA, 20 bp, Artificial Sequence
  Description of Artificial Sequence: Synthetic primer
tccgggtatacactgtccca

SEQ ID NO: 6952 - DNA, 21 bp, Artificial Sequence
  Description of Artificial Sequence: Synthetic primer
tggcctgtcctctgttaacca

SEQ ID NO: 6953 - DNA, 45 bp, Artificial Sequence
  Description of Artificial Sequence: Synthetic primer
  Description of Combined DNA/RNA Molecule: Synthetic primer
tggcctgtcctctgttaaccagagagaggtgcagggacttgcaga

SEQ ID NO: 6954 - DNA, 41 bp, Artificial Sequence
  Description of Artificial Sequence: Synthetic primer
  Description of Combined DNA/RNA Molecule: Synthetic primer
acgacgacgacgaagctgcattcacagtgcagtgcacccaa

SEQ ID NO: 6955 - DNA, 40 bp, Artificial Sequence
  Description of Artificial Sequence: Synthetic primer
  Description of Combined DNA/RNA Molecule: Synthetic primer
acgacgacgacgaaattcacagtgcagtgcacccagtggg

SEQ ID NO: 6956 - DNA, 52 bp, Artificial Sequence
  Description of Artificial Sequence: Synthetic primer
  Description of Combined DNA/RNA Molecule: Synthetic primer
acgacgacgacttgacgaacataatggcctgaggaggtggtgagtgaugtct

SEQ ID NO: 6957 - DNA, 47 bp, Artificial Sequence
  Description of Artificial Sequence: Synthetic oligonucleotide
  Description of Combined DNA/RNA Molecule: Synthetic oligonucleotide
tgcgactctattcacgtccaaggagcacccacaaagtggacaugtga

SEQ ID NO: 6958 - DNA, 47 bp, Artificial Sequence
  Description of Artificial Sequence: Synthetic oligonucleotide
tgtagggctggcagacccagagaaggttgctatttggtgtaccgcca

SEQ ID NO: 6959 - DNA, 26 bp, Artificial Sequence
  Description of Artificial Sequence: Synthetic probe
ttgtggacatgtagggctggcagacc

SEQ ID NO: 6960 - DNA, 21 bp, Artificial Sequence
  Description of Artificial Sequence: Synthetic primer
tgcgactctattcacgtccaa

SEQ ID NO: 6961 - DNA, 21 bp, Artificial Sequence
  Description of Artificial Sequence: Synthetic primer
tggcggtacaccaaatagcaa

SEQ ID NO: 6962 - DNA, 49 bp, Artificial Sequence
  Description of Artificial Sequence: Synthetic primer
  Description of Combined DNA/RNA Molecule: Synthetic primer
tggcggtacaccaaatagcaagaggtctctgagtgcccttctttgggtt

SEQ ID NO: 6963 - DNA, 41 bp, Artificial Sequence
  Description of Artificial Sequence: Synthetic primer
  Description of Combined DNA/RNA Molecule: Synthetic primer
acgacgacgacgaacagggattgagtgccagaggcacacaa

SEQ ID NO: 6964 - DNA, 37 bp, Artificial Sequence
  Description of Artificial Sequence: Synthetic primer
  Description of Combined DNA/RNA Molecule: Synthetic primer
acgacgacgacgaagcccccacatggcagggautgaa

SEQ ID NO: 6965 - DNA, 46 bp, Artificial Sequence
  Description of Artificial Sequence: Synthetic primer
  Description of Combined DNA/RNA Molecule: Synthetic primer
acgacgacgacttgacgaacataattggagaggtgggaggcaggag

SEQ ID NO: 6966 - DNA, 46 bp, Artificial Sequence
  Description of Artificial Sequence: Synthetic oligonucleotide
  Description of Combined DNA/RNA Molecule: Synthetic oligonucleotide
ttgtgcagagcgaacaacaacacaggctacagcaggtgacaggttg

SEQ ID NO: 6967 - DNA, 50 bp, Artificial Sequence
  Description of Artificial Sequence: Synthetic oligonucleotide
ggtcagtctcttcctgccaagtgcaccaattgctatttggtgtaccgcca

SEQ ID NO: 6968 - DNA, 30 bp, Artificial Sequence
  Description of Artificial Sequence: Synthetic probe
ttggtgacaggtcagtctcttcctgccaag

SEQ ID NO: 6969 - DNA, 20 bp, Artificial Sequence
  Description of Artificial Sequence: Synthetic primer
ttgtgcagagcgaacaacaa

SEQ ID NO: 6970 - DNA, 21 bp, Artificial Sequence
  Description of Artificial Sequence: Synthetic primer
tggcggtacaccaaatagcaa

SEQ ID NO: 6971 - DNA, 46 bp, Artificial Sequence
  Description of Artificial Sequence: Synthetic primer
  Description of Combined DNA/RNA Molecule: Synthetic primer
tggcggtacaccaaatagcaagaagaggtgggaggcttgatgcacc

SEQ ID NO: 6972 - DNA, 47 bp, Artificial Sequence; identical to SEQ ID NO: 1190
  Description of Artificial Sequence: Synthetic primer
  Description of Combined DNA/RNA Molecule: Synthetic primer

SEQ ID NO: 6973 - DNA, 46 bp, Artificial Sequence; identical to SEQ ID NO: 1191
  Description of Artificial Sequence: Synthetic primer
  Description of Combined DNA/RNA Molecule: Synthetic primer

SEQ ID NO: 6974 - DNA, 51 bp, Artificial Sequence; identical to SEQ ID NO: 1192
  Description of Artificial Sequence: Synthetic primer
  Description of Combined DNA/RNA Molecule: Synthetic primer

SEQ ID NO: 6975 - DNA, 47 bp, Artificial Sequence; identical to SEQ ID NO: 1193
  Description of Artificial Sequence: Synthetic oligonucleotide
  Description of Combined DNA/RNA Molecule: Synthetic oligonucleotide

SEQ ID NO: 6976 - DNA, 46 bp, Artificial Sequence; identical to SEQ ID NO: 1194
  Description of Artificial Sequence: Synthetic oligonucleotide

SEQ ID NO: 6977 - DNA, 27 bp, Artificial Sequence
  Description of Artificial Sequence: Synthetic probe
ttgaagtcaagcatgggcaccaagcca

SEQ ID NO: 6978 - DNA, 22 bp, Artificial Sequence
  Description of Artificial Sequence: Synthetic primer
tacagatacggacgggaatcaa

SEQ ID NO: 6979 - DNA, 22 bp, Artificial Sequence
  Description of Artificial Sequence: Synthetic primer
tgacgcaggaggatgtaaacaa

SEQ ID NO: 6980 - DNA, 49 bp, Artificial Sequence; identical to SEQ ID NO: 1198
  Description of Artificial Sequence: Synthetic primer
  Description of Combined DNA/RNA Molecule: Synthetic primer

SEQ ID NO: 6981 - DNA, 40 bp, Artificial Sequence; identical to SEQ ID NO: 1269
  Description of Artificial Sequence: Synthetic primer
  Description of Combined DNA/RNA Molecule: Synthetic primer

SEQ ID NO: 6982 - DNA, 41 bp, Artificial Sequence; identical to SEQ ID NO: 1270
  Description of Artificial Sequence: Synthetic primer
  Description of Combined DNA/RNA Molecule: Synthetic primer

SEQ ID NO: 6983 - DNA, 53 bp, Artificial Sequence; identical to SEQ ID NO: 1271
  Description of Artificial Sequence: Synthetic primer
  Description of Combined DNA/RNA Molecule: Synthetic primer

SEQ ID NO: 6984 - DNA, 47 bp, Artificial Sequence; identical to SEQ ID NO: 1272
  Description of Artificial Sequence: Synthetic oligonucleotide
  Description of Combined DNA/RNA Molecule: Synthetic oligonucleotide

SEQ ID NO: 6985 - DNA, 40 bp, Artificial Sequence; identical to SEQ ID NO: 1273
  Description of Artificial Sequence: Synthetic oligonucleotide

SEQ ID NO: 6986 - DNA, 27 bp, Artificial Sequence
  Description of Artificial Sequence: Synthetic probe
aagtcaccaagggctcctccaccacca

SEQ ID NO: 6987 - DNA, 20 bp, Artificial Sequence
  Description of Artificial Sequence: Synthetic primer
taccctcctagctccgtaca

SEQ ID NO: 6988 - DNA, 19 bp, Artificial Sequence
  Description of Artificial Sequence: Synthetic primer
tgcaccaccagacaacaca

SEQ ID NO: 6989 - DNA, 44 bp, Artificial Sequence; identical to SEQ ID NO: 1277
  Description of Artificial Sequence: Synthetic primer
  Description of Combined DNA/RNA Molecule: Synthetic primer

SEQ ID NO: 6990 - DNA, 40 bp, Artificial Sequence; identical to SEQ ID NO: 1349
  Description of Artificial Sequence: Synthetic primer
  Description of Combined DNA/RNA Molecule: Synthetic primer

SEQ ID NO: 6991 - DNA, 41 bp, Artificial Sequence; identical to SEQ ID NO: 1350
  Description of Artificial Sequence: Synthetic primer
  Description of Combined DNA/RNA Molecule: Synthetic primer

SEQ ID NO: 6992 - DNA, 51 bp, Artificial Sequence; identical to SEQ ID NO: 1351
  Description of Artificial Sequence: Synthetic primer
  Description of Combined DNA/RNA Molecule: Synthetic primer

SEQ ID NO: 6993 - DNA, 48 bp, Artificial Sequence; identical to SEQ ID NO: 1352
  Description of Artificial Sequence: Synthetic oligonucleotide
  Description of Combined DNA/RNA Molecule: Synthetic oligonucleotide

SEQ ID NO: 6994 - DNA, 46 bp, Artificial Sequence; identical to SEQ ID NO: 1353
  Description of Artificial Sequence: Synthetic oligonucleotide

SEQ ID NO: 6995 - DNA, 25 bp, Artificial Sequence
  Description of Artificial Sequence: Synthetic probe
aaccacccacccaccaactgtagcc

SEQ ID NO: 6996 - DNA, 19 bp, Artificial Sequence
  Description of Artificial Sequence: Synthetic primer
ttcgcctaccgcagtgaac

SEQ ID NO: 6997 - DNA, 19 bp, Artificial Sequence
  Description of Artificial Sequence: Synthetic primer
tgcgagcccatgtctcaac

SEQ ID NO: 6998 - DNA, 42 bp, Artificial Sequence; identical to SEQ ID NO: 1357
  Description of Artificial Sequence: Synthetic primer
  Description of Combined DNA/RNA Molecule: Synthetic primer

SEQ ID NO: 6999 - DNA, 39 bp, Artificial Sequence; identical to SEQ ID NO: 1427
  Description of Artificial Sequence: Synthetic primer
  Description of Combined DNA/RNA Molecule: Synthetic primer

SEQ ID NO: 7000 - DNA, 37 bp, Artificial Sequence; identical to SEQ ID NO: 1428
  Description of Artificial Sequence: Synthetic primer
  Description of Combined DNA/RNA Molecule: Synthetic primer

SEQ ID NO: 7001 - DNA, 52 bp, Artificial Sequence; identical to SEQ ID NO: 1429
  Description of Artificial Sequence: Synthetic primer
  Description of Combined DNA/RNA Molecule: Synthetic primer

SEQ ID NO: 7002 - DNA, 45 bp, Artificial Sequence; identical to SEQ ID NO: 1430
  Description of Artificial Sequence: Synthetic oligonucleotide
  Description of Combined DNA/RNA Molecule: Synthetic oligonucleotide

SEQ ID NO: 7003 - DNA, 42 bp, Artificial Sequence; identical to SEQ ID NO: 1431
  Description of Artificial Sequence: Synthetic oligonucleotide

SEQ ID NO: 7004 - DNA, 24 bp, Artificial Sequence
  Description of Artificial Sequence: Synthetic probe
aattcatcacctccacccccaagc

SEQ ID NO: 7005 - DNA, 19 bp, Artificial Sequence
  Description of Artificial Sequence: Synthetic primer
ttggcaactctccacccaa

SEQ ID NO: 7006 - DNA, 21 bp, Artificial Sequence
  Description of Artificial Sequence: Synthetic primer
tgctatcctggcgcaatacaa

SEQ ID NO: 7007 - DNA, 46 bp, Artificial Sequence; identical to SEQ ID NO: 1435
  Description of Artificial Sequence: Synthetic primer
  Description of Combined DNA/RNA Molecule: Synthetic primer

SEQ ID NO: 7008 - DNA, 40 bp, Artificial Sequence; identical to SEQ ID NO: 2371
  Description of Artificial Sequence: Synthetic primer
  Description of Combined DNA/RNA Molecule: Synthetic primer

SEQ ID NO: 7009 - DNA, 38 bp, Artificial Sequence; identical to SEQ ID NO: 2372
  Description of Artificial Sequence: Synthetic primer
  Description of Combined DNA/RNA Molecule: Synthetic primer

SEQ ID NO: 7010 - DNA, 51 bp, Artificial Sequence; identical to SEQ ID NO: 2373
  Description of Artificial Sequence: Synthetic primer
  Description of Combined DNA/RNA Molecule: Synthetic primer

SEQ ID NO: 7011 - DNA, 43 bp, Artificial Sequence; identical to SEQ ID NO: 2374
  Description of Artificial Sequence: Synthetic oligonucleotide
  Description of Combined DNA/RNA Molecule: Synthetic oligonucleotide

SEQ ID NO: 7012 - DNA, 49 bp, Artificial Sequence; identical to SEQ ID NO: 2375
  Description of Artificial Sequence: Synthetic oligonucleotide

SEQ ID NO: 7013 - DNA, 27 bp, Artificial Sequence
  Description of Artificial Sequence: Synthetic probe
ttcactacaccctctccaccagttggg

SEQ ID NO: 7014 - DNA, 21 bp, Artificial Sequence
  Description of Artificial Sequence: Synthetic primer
tctcataaacactccggccac

SEQ ID NO: 7015 - DNA, 20 bp, Artificial Sequence
  Description of Artificial Sequence: Synthetic primer
tctgcccgttattgagccac

SEQ ID NO: 7016 - DNA, 48 bp, Artificial Sequence; identical to SEQ ID NO: 2379
  Description of Artificial Sequence: Synthetic primer
  Description of Combined DNA/RNA Molecule: Synthetic primer

SEQ ID NO: 7017 - DNA, 45 bp, Artificial Sequence; identical to SEQ ID NO: 2441
  Description of Artificial Sequence: Synthetic primer
  Description of Combined DNA/RNA Molecule: Synthetic primer

SEQ ID NO: 7018 - DNA, 46 bp, Artificial Sequence; identical to SEQ ID NO: 2442
  Description of Artificial Sequence: Synthetic primer
  Description of Combined DNA/RNA Molecule: Synthetic primer

SEQ ID NO: 7019 - DNA, 52 bp, Artificial Sequence; identical to SEQ ID NO: 2443
  Description of Artificial Sequence: Synthetic primer
  Description of Combined DNA/RNA Molecule: Synthetic primer

SEQ ID NO: 7020 - DNA, 49 bp, Artificial Sequence; identical to SEQ ID NO: 2444
  Description of Artificial Sequence: Synthetic oligonucleotide
  Description of Combined DNA/RNA Molecule: Synthetic oligonucleotide

SEQ ID NO: 7021 - DNA, 48 bp, Artificial Sequence; identical to SEQ ID NO: 2445
  Description of Artificial Sequence: Synthetic oligonucleotide

SEQ ID NO: 7022 - DNA, 27 bp, Artificial Sequence
  Description of Artificial Sequence: Synthetic probe
ttaggttcacagctctcccacatcctg

SEQ ID NO: 7023 - DNA, 19 bp, Artificial Sequence
  Description of Artificial Sequence: Synthetic primer
ttggcgcaacggtttccaa

SEQ ID NO: 7024 - DNA, 22 bp, Artificial Sequence
  Description of Artificial Sequence: Synthetic primer
tgacgcaggaggatgtaaacaa

SEQ ID NO: 7025 - DNA, 51 bp, Artificial Sequence; identical to SEQ ID NO: 2449
  Description of Artificial Sequence: Synthetic primer
  Description of Combined DNA/RNA Molecule: Synthetic primer

SEQ ID NO: 7026 - DNA, 40 bp, Artificial Sequence; identical to SEQ ID NO: 2978
  Description of Artificial Sequence: Synthetic primer
  Description of Combined DNA/RNA Molecule: Synthetic primer

SEQ ID NO: 7027 - DNA, 40 bp, Artificial Sequence; identical to SEQ ID NO: 2979
  Description of Artificial Sequence: Synthetic primer
  Description of Combined DNA/RNA Molecule: Synthetic primer

SEQ ID NO: 7028 - DNA, 48 bp, Artificial Sequence; identical to SEQ ID NO: 2980
  Description of Artificial Sequence: Synthetic primer
  Description of Combined DNA/RNA Molecule: Synthetic primer

SEQ ID NO: 7029 - DNA, 48 bp, Artificial Sequence; identical to SEQ ID NO: 2981
  Description of Artificial Sequence: Synthetic oligonucleotide
  Description of Combined DNA/RNA Molecule: Synthetic oligonucleotide

SEQ ID NO: 7030 - DNA, 38 bp, Artificial Sequence; identical to SEQ ID NO: 2982
  Description of Artificial Sequence: Synthetic oligonucleotide

SEQ ID NO: 7031 - DNA, 22 bp, Artificial Sequence
  Description of Artificial Sequence: Synthetic probe
aagaggacaaggagcagctgcc

SEQ ID NO: 7032 - DNA, 21 bp, Artificial Sequence
  Description of Artificial Sequence: Synthetic primer
tcggagagaggagccctaaac

SEQ ID NO: 7033 - DNA, 19 bp, Artificial Sequence
  Description of Artificial Sequence: Synthetic primer
tggtccgcacagaggaaac

SEQ ID NO: 7034 - DNA, 44 bp, Artificial Sequence; identical to SEQ ID NO: 2986
  Description of Artificial Sequence: Synthetic primer
  Description of Combined DNA/RNA Molecule: Synthetic primer

SEQ ID NO: 7035 - DNA, 37 bp, Artificial Sequence; identical to SEQ ID NO: 5199
  Description of Artificial Sequence: Synthetic primer
  Description of Combined DNA/RNA Molecule: Synthetic primer

SEQ ID NO: 7036 - DNA, 38 bp, Artificial Sequence; identical to SEQ ID NO: 5200
  Description of Artificial Sequence: Synthetic primer
  Description of Combined DNA/RNA Molecule: Synthetic primer

SEQ ID NO: 7037 - DNA, 54 bp, Artificial Sequence; identical to SEQ ID NO: 5201
  Description of Artificial Sequence: Synthetic primer
  Description of Combined DNA/RNA Molecule: Synthetic primer

SEQ ID NO: 7038 - DNA, 46 bp, Artificial Sequence; identical to SEQ ID NO: 5202
  Description of Artificial Sequence: Synthetic oligonucleotide
  Description of Combined DNA/RNA Molecule: Synthetic oligonucleotide

SEQ ID NO: 7039 - DNA, 55 bp, Artificial Sequence; identical to SEQ ID NO: 5203
  Description of Artificial Sequence: Synthetic oligonucleotide

SEQ ID NO: 7040 - DNA, 31 bp, Artificial Sequence; identical to SEQ ID NO: 5204
  Description of Artificial Sequence: Synthetic probe

SEQ ID NO: 7041 - DNA, 22 bp, Artificial Sequence
  Description of Artificial Sequence: Synthetic primer
tgtgcactagtccacgtgaaac

SEQ ID NO: 7042 - DNA, 22 bp, Artificial Sequence
  Description of Artificial Sequence: Synthetic primer
tgaatgcaaagatcgcggaaac

SEQ ID NO: 7043 - DNA, 52 bp, Artificial Sequence; identical to SEQ ID NO: 5207
  Description of Artificial Sequence: Synthetic primer
  Description of Combined DNA/RNA Molecule: Synthetic primer

SEQ ID NO: 7044 - DNA, 37 bp, Artificial Sequence; identical to SEQ ID NO: 5333
  Description of Artificial Sequence: Synthetic primer
  Description of Combined DNA/RNA Molecule: Synthetic primer

SEQ ID NO: 7045 - DNA, 41 bp, Artificial Sequence; identical to SEQ ID NO: 5334
  Description of Artificial Sequence: Synthetic primer
  Description of Combined DNA/RNA Molecule: Synthetic primer

SEQ ID NO: 7046 - DNA, 50 bp, Artificial Sequence; identical to SEQ ID NO: 5335
  Description of Artificial Sequence: Synthetic primer
  Description of Combined DNA/RNA Molecule: Synthetic primer

SEQ ID NO: 7047 - DNA, 44 bp, Artificial Sequence; identical to SEQ ID NO: 5336
  Description of Artificial Sequence: Synthetic oligonucleotide
  Description of Combined DNA/RNA Molecule: Synthetic oligonucleotide

SEQ ID NO: 7048 - DNA, 42 bp, Artificial Sequence; identical to SEQ ID NO: 5337
  Description of Artificial Sequence: Synthetic oligonucleotide

SEQ ID NO: 7049 - DNA, 27 bp, Artificial Sequence
  Description of Artificial Sequence: Synthetic probe
ttaatctcagaggcccacagccagtca

SEQ ID NO: 7050 - DNA, 19 bp, Artificial Sequence
  Description of Artificial Sequence: Synthetic primer
ttacaggccgcatagcaac

SEQ ID NO: 7051 - DNA, 19 bp, Artificial Sequence
  Description of Artificial Sequence: Synthetic primer
tgcgagcccatgtctcaac

SEQ ID NO: 7052 - DNA, 51 bp, Artificial Sequence; identical to SEQ ID NO: 5341
  Description of Artificial Sequence: Synthetic primer
  Description of Combined DNA/RNA Molecule: Synthetic primer

SEQ ID NO: 7053 - DNA, 39 bp, Artificial Sequence; identical to SEQ ID NO: 5369
  Description of Artificial Sequence: Synthetic primer
  Description of Combined DNA/RNA Molecule: Synthetic primer

SEQ ID NO: 7054 - DNA, 41 bp, Artificial Sequence; identical to SEQ ID NO: 5370
  Description of Artificial Sequence: Synthetic primer
  Description of Combined DNA/RNA Molecule: Synthetic primer

SEQ ID NO: 7055 - DNA, 52 bp, Artificial Sequence; identical to SEQ ID NO: 5371
  Description of Artificial Sequence: Synthetic primer
  Description of Combined DNA/RNA Molecule: Synthetic primer

SEQ ID NO: 7056 - DNA, 48 bp, Artificial Sequence; identical to SEQ ID NO: 5372
  Description of Artificial Sequence: Synthetic oligonucleotide
  Description of Combined DNA/RNA Molecule: Synthetic oligonucleotide

SEQ ID NO: 7057 - DNA, 50 bp, Artificial Sequence; identical to SEQ ID NO: 5373
  Description of Artificial Sequence: Synthetic oligonucleotide

SEQ ID NO: 7058 - DNA, 30 bp, Artificial Sequence; identical to SEQ ID NO: 5374
  Description of Artificial Sequence: Synthetic probe

SEQ ID NO: 7059 - DNA, 21 bp, Artificial Sequence
  Description of Artificial Sequence: Synthetic primer
taccactcatcttctgcgaca

SEQ ID NO: 7060 - DNA, 20 bp, Artificial Sequence
  Description of Artificial Sequence: Synthetic primer
tgcgggtagatcgactcaca

SEQ ID NO: 7061 - DNA, 46 bp, Artificial Sequence; identical to SEQ ID NO: 5377
  Description of Artificial Sequence: Synthetic primer
  Description of Combined DNA/RNA Molecule: Synthetic primer

SEQ ID NO: 7062 - DNA, 41 bp, Artificial Sequence; identical to SEQ ID NO: 5297
  Description of Artificial Sequence: Synthetic primer
  Description of Combined DNA/RNA Molecule: Synthetic primer

SEQ ID NO: 7063 - DNA, 43 bp, Artificial Sequence; identical to SEQ ID NO: 5684
  Description of Artificial Sequence: Synthetic primer
  Description of Combined DNA/RNA Molecule: Synthetic primer

SEQ ID NO: 7064 - DNA, 52 bp, Artificial Sequence; identical to SEQ ID NO: 5685
  Description of Artificial Sequence: Synthetic primer
  Description of Combined DNA/RNA Molecule: Synthetic primer

SEQ ID NO: 7065 - DNA, 48 bp, Artificial Sequence; identical to SEQ ID NO: 5686
  Description of Artificial Sequence: Synthetic oligonucleotide
  Description of Combined DNA/RNA Molecule: Synthetic oligonucleotide

SEQ ID NO: 7066 - DNA, 46 bp, Artificial Sequence; identical to SEQ ID NO: 5687
  Description of Artificial Sequence: Synthetic oligonucleotide

SEQ ID NO: 7067 - DNA, 23 bp, Artificial Sequence
  Description of Artificial Sequence: Synthetic probe
ccgaggtcaggagtcagcccacc

SEQ ID NO: 7068 - DNA, 22 bp, Artificial Sequence
  Description of Artificial Sequence: Synthetic primer
tgccctatcgaaaaggacaaca

SEQ ID NO: 7069 - DNA, 21 bp, Artificial Sequence
  Description of Artificial Sequence: Synthetic primer
tgtcatagacagccgcaaaca

SEQ ID NO: 7070 - DNA, 49 bp, Artificial Sequence; identical to SEQ ID NO: 5691
  Description of Artificial Sequence: Synthetic primer
  Description of Combined DNA/RNA Molecule: Synthetic primer

SEQ ID NO: 7071 - DNA, 43 bp, Artificial Sequence; identical to SEQ ID NO: 5994
  Description of Artificial Sequence: Synthetic primer
  Description of Combined DNA/RNA Molecule: Synthetic primer

SEQ ID NO: 7072 - DNA, 46 bp, Artificial Sequence; identical to SEQ ID NO: 5995
  Description of Artificial Sequence: Synthetic primer
  Description of Combined DNA/RNA Molecule: Synthetic primer

SEQ ID NO: 7073 - DNA, 56 bp, Artificial Sequence; identical to SEQ ID NO: 5996
  Description of Artificial Sequence: Synthetic primer
  Description of Combined DNA/RNA Molecule: Synthetic primer

SEQ ID NO: 7074 - DNA, 48 bp, Artificial Sequence; identical to SEQ ID NO: 5997
  Description of Artificial Sequence: Synthetic oligonucleotide
  Description of Combined DNA/RNA Molecule: Synthetic oligonucleotide

SEQ ID NO: 7075 - DNA, 53 bp, Artificial Sequence; identical to SEQ ID NO: 5998
  Description of Artificial Sequence: Synthetic oligonucleotide

SEQ ID NO: 7076 - DNA, 28 bp, Artificial Sequence
  Description of Artificial Sequence: Synthetic probe
tttgtgccacagggttccttaaccacaa

SEQ ID NO: 7077 - DNA, 19 bp, Artificial Sequence
  Description of Artificial Sequence: Synthetic primer
tctgccagaacaccgacac

SEQ ID NO: 7078 - DNA, 19 bp, Artificial Sequence
  Description of Artificial Sequence: Synthetic primer
tcaccgtacgccaacacac

SEQ ID NO: 7079 - DNA, 45 bp, Artificial Sequence; identical to SEQ ID NO: 6002
  Description of Artificial Sequence: Synthetic primer
  Description of Combined DNA/RNA Molecule: Synthetic primer

SEQ ID NO: 7080 - DNA, 40 bp, Artificial Sequence; identical to SEQ ID NO: 6200
  Description of Artificial Sequence: Synthetic primer
  Description of Combined DNA/RNA Molecule: Synthetic primer

SEQ ID NO: 7081 - DNA, 41 bp, Artificial Sequence; identical to SEQ ID NO: 6201
  Description of Artificial Sequence: Synthetic primer
  Description of Combined DNA/RNA Molecule: Synthetic primer

SEQ ID NO: 7082 - DNA, 50 bp, Artificial Sequence; identical to SEQ ID NO: 6202
  Description of Artificial Sequence: Synthetic primer
  Description of Combined DNA/RNA Molecule: Synthetic primer

SEQ ID NO: 7083 - DNA, 51 bp, Artificial Sequence; identical to SEQ ID NO: 6203
  Description of Artificial Sequence: Synthetic oligonucleotide
  Description of Combined DNA/RNA Molecule: Synthetic oligonucleotide

SEQ ID NO: 7084 - DNA, 57 bp, Artificial Sequence; identical to SEQ ID NO: 6204
  Description of Artificial Sequence: Synthetic oligonucleotide

SEQ ID NO: 7085 - DNA, 28 bp, Artificial Sequence
  Description of Artificial Sequence: Synthetic probe
ttctgttcactcaccccagacagatgcc

SEQ ID NO: 7086 - DNA, 22 bp, Artificial Sequence
  Description of Artificial Sequence: Synthetic primer
tacagatacggacgggaatcaa

SEQ ID NO: 7087 - DNA, 22 bp, Artificial Sequence
  Description of Artificial Sequence: Synthetic primer
tgacgcaggaggatgtaaacaa

SEQ ID NO: 7088 - DNA, 59 bp, Artificial Sequence; identical to SEQ ID NO: 6208
  Description of Artificial Sequence: Synthetic primer
  Description of Combined DNA/RNA Molecule: Synthetic primer

SEQ ID NO: 7089 - DNA, 44 bp, Artificial Sequence
  Description of Artificial Sequence: Synthetic primer
  Description of Combined DNA/RNA Molecule: Synthetic primer
acgacgacgacgaacttagacaggtgaccccacaaagcaggtga

SEQ ID NO: 7090 - DNA, 43 bp, Artificial Sequence
  Description of Artificial Sequence: Synthetic primer
  Description of Combined DNA/RNA Molecule: Synthetic primer
acgacgacgacgaaggcttagacaggtgaccccacaaagcaga

SEQ ID NO: 7091 - DNA, 49 bp, Artificial Sequence
  Description of Artificial Sequence: Synthetic primer
  Description of Combined DNA/RNA Molecule: Synthetic primer
acgacgacgacttgacgaacataatcactgccccctctgctggccaatt

SEQ ID NO: 7092 - DNA, 45 bp, Artificial Sequence
  Description of Artificial Sequence: Synthetic oligonucleotide
  Description of Combined DNA/RNA Molecule: Synthetic oligonucleotide
tccaaacgattaggagcgtcaaggtgggcaggcacagtcaaggaa

SEQ ID NO: 7093 - DNA, 41 bp, Artificial Sequence
  Description of Artificial Sequence: Synthetic oligonucleotide
aggagcaggaggcaggcagcttggacagaggtatacgccca

SEQ ID NO: 7094 - DNA, 24 bp, Artificial Sequence
  Description of Artificial Sequence: Synthetic probe
ttacagtcaaggagcaggaggcag

SEQ ID NO: 7095 - DNA, 22 bp, Artificial Sequence
  Description of Artificial Sequence: Synthetic primer
tccaaacgattaggagcgtcaa

SEQ ID NO: 7096 - DNA, 21 bp, Artificial Sequence
  Description of Artificial Sequence: Synthetic primer
tgggcgtatacctctgtccaa

SEQ ID NO: 7097 - DNA, 47 bp, Artificial Sequence
  Description of Artificial Sequence: Synthetic primer
  Description of Combined DNA/RNA Molecule: Synthetic primer
tgggcgtatacctctgtccaaccccctctgctggccaatcgtggaga

SEQ ID NO: 7098 - DNA, 37 bp, Artificial Sequence
  Description of Artificial Sequence: Synthetic primer
  Description of Combined DNA/RNA Molecule: Synthetic primer
acgacgacgacgaaagccaggtcctgggcacauggaa

SEQ ID NO: 7099 - DNA, 39 bp, Artificial Sequence
  Description of Artificial Sequence: Synthetic primer
  Description of Combined DNA/RNA Molecule: Synthetic primer
acgacgacgacgaaccaggtcctgggcacatggaggcta

SEQ ID NO: 7100 - DNA, 60 bp, Artificial Sequence
  Description of Artificial Sequence: Synthetic primer
  Description of Combined DNA/RNA Molecule: Synthetic primer
acgacgacgacttgacgaacataatgaaatgagaatgcatggatgaatgtgcaaaaccct

SEQ ID NO: 7101 - DNA, 46 bp, Artificial Sequence
  Description of Artificial Sequence: Synthetic oligonucleotide
  Description of Combined DNA/RNA Molecule: Synthetic oligonucleotide
ttgcagcgggtcacaacaacagggaaaccactgaaggctcagccga

SEQ ID NO: 7102 - DNA, 40 bp, Artificial Sequence
  Description of Artificial Sequence: Synthetic oligonucleotide
gccaggcccagggaagggcttggacagaggtatacgccca

SEQ ID NO: 7103 - DNA, 21 bp, Artificial Sequence
  Description of Artificial Sequence: Synthetic probe
ttaggctcagccaggcccagg

SEQ ID NO: 7104 - DNA, 19 bp, Artificial Sequence
  Description of Artificial Sequence: Synthetic primer
ttgcagcgggtcacaacaa

SEQ ID NO: 7105 - DNA, 21 bp, Artificial Sequence
  Description of Artificial Sequence: Synthetic primer
tgggcgtatacctctgtccaa

SEQ ID NO: 7106 - DNA, 51 bp, Artificial Sequence
  Description of Artificial Sequence: Synthetic primer
  Description of Combined DNA/RNA Molecule: Synthetic primer
tgggcgtatacctctgtccaatgcaaaacccctcaagcctttggttgcccc

SEQ ID NO: 7107 - DNA, 45 bp, Artificial Sequence
  Description of Artificial Sequence: Synthetic primer
  Description of Combined DNA/RNA Molecule: Synthetic primer
acgacgacgacgaaccaaggcactcaaaatgaccaatgcacaggc

SEQ ID NO: 7108 - DNA, 45 bp, Artificial Sequence
  Description of Artificial Sequence: Synthetic primer
  Description of Combined DNA/RNA Molecule: Synthetic primer
acgacgacgacgaaaaggcactcaaaatgaccaatgcacaggtcg

SEQ ID NO: 7109 - DNA, 49 bp, Artificial Sequence
  Description of Artificial Sequence: Synthetic primer
  Description of Combined DNA/RNA Molecule: Synthetic primer
acgacgacgacttgacgaacataatctgcttgtgggtggctggcctgct

SEQ ID NO: 7110 - DNA, 51 bp, Artificial Sequence
  Description of Artificial Sequence: Synthetic oligonucleotide
  Description of Combined DNA/RNA Molecule: Synthetic oligonucleotide
tcgtcccggtcagtagtcaagtcaaaacctggttccagaaccaacagacgg

SEQ ID NO: 7111 - DNA, 48 bp, Artificial Sequence
  Description of Artificial Sequence: Synthetic oligonucleotide
gacaaagtggaggtgagcaagcagggcattgcccattttctgcaccca

SEQ ID NO: 7112 - DNA, 30 bp, Artificial Sequence
  Description of Artificial Sequence: Synthetic probe
ttaccaacagacaaagtggaggtgagcaag

SEQ ID NO: 7113 - DNA, 20 bp, Artificial Sequence
  Description of Artificial Sequence: Synthetic primer
tcgtcccggtcagtagtcaa

SEQ ID NO: 7114 - DNA, 20 bp, Artificial Sequence
  Description of Artificial Sequence: Synthetic primer
tgggtgcagaaaatgggcaa

SEQ ID NO: 7115 - DNA, 41 bp, Artificial Sequence
  Description of Artificial Sequence: Synthetic primer
  Description of Combined DNA/RNA Molecule: Synthetic primer
tgggtgcagaaaatgggcaagtggctggcctgccttgctta

SEQ ID NO: 7116 - DNA, 38 bp, Artificial Sequence
  Description of Artificial Sequence: Synthetic primer
  Description of Combined DNA/RNA Molecule: Synthetic primer
acgacgacgacgaaggcagcacagggtaccccagcttt

SEQ ID NO: 7117 - DNA, 41 bp, Artificial Sequence
  Description of Artificial Sequence: Synthetic primer
  Description of Combined DNA/RNA Molecule: Synthetic primer
acgacgacgacgaagttcaacctccagggcagcacagggtg

SEQ ID NO: 7118 - DNA, 51 bp, Artificial Sequence
  Description of Artificial Sequence: Synthetic primer
  Description of Combined DNA/RNA Molecule: Synthetic primer
acgacgacgacttgacgaacataatcagtgcctctggctcagtgcagatga

SEQ ID NO: 7119 - DNA, 47 bp, Artificial Sequence
  Description of Artificial Sequence: Synthetic oligonucleotide
  Description of Combined DNA/RNA Molecule: Synthetic oligonucleotide
ttcgtgcgtcgtgtagcaacttcagagcaggaagggagcgcaccctg

SEQ ID NO: 7120 - DNA, 46 bp, Artificial Sequence
  Description of Artificial Sequence: Synthetic oligonucleotide
ccccatcctggagctccaactcccacttgcccattttctgcaccca

SEQ ID NO: 7121 - DNA, 23 bp, Artificial Sequence
  Description of Artificial Sequence: Synthetic probe
ttgagcgcaccccatcctggagc

SEQ ID NO: 7122 - DNA, 19 bp, Artificial Sequence
  Description of Artificial Sequence: Synthetic primer
ttcgtgcgtcgtgtagcaa

SEQ ID NO: 7123 - DNA, 20 bp, Artificial Sequence
  Description of Artificial Sequence: Synthetic primer
tgggtgcagaaaatgggcaa

SEQ ID NO: 7124 - DNA, 47 bp, Artificial Sequence
  Description of Artificial Sequence: Synthetic primer
  Description of Combined DNA/RNA Molecule: Synthetic primer
tgggtgcagaaaatgggcaacagtgcagatgaggtgggagctggagt

SEQ ID NO: 7125 - DNA, 47 bp, Artificial Sequence
  Description of Artificial Sequence: Synthetic primer
  Description of Combined DNA/RNA Molecule: Synthetic primer
acgacgacgacgaatataggtcacccctatcagaaccagacacccct

SEQ ID NO: 7126 - DNA, 49 bp, Artificial Sequence
  Description of Artificial Sequence: Synthetic primer
  Description of Combined DNA/RNA Molecule: Synthetic primer
acgacgacgacgaacactgtaacacaccatataggtcacccctaucagg

SEQ ID NO: 7127 - DNA, 55 bp, Artificial Sequence
  Description of Artificial Sequence: Synthetic primer
  Description of Combined DNA/RNA Molecule: Synthetic primer
acgacgacgacttgacgaacataatcaggtacttctggtggtggaagtgcutctt

SEQ ID NO: 7128 - DNA, 49 bp, Artificial Sequence
  Description of Artificial Sequence: Synthetic oligonucleotide
  Description of Combined DNA/RNA Molecule: Synthetic oligonucleotide
ttcgtgcgtcgtgtagcaaccccaagaagaagaagccacacgcaucccc

SEQ ID NO: 7129 - DNA, 49 bp, Artificial Sequence
  Description of Artificial Sequence: Synthetic oligonucleotide
tccttcacacacctgcagatctgcaagctttgcccattttctgcaccca

SEQ ID NO: 7130 - DNA, 27 bp, Artificial Sequence
  Description of Artificial Sequence: Synthetic probe
ttacacgcatccttcacacacctgcag

SEQ ID NO: 7131 - DNA, 19 bp, Artificial Sequence
  Description of Artificial Sequence: Synthetic primer
ttcgtgcgtcgtgtagcaa

SEQ ID NO: 7132 - DNA, 20 bp, Artificial Sequence
  Description of Artificial Sequence: Synthetic primer
tgggtgcagaaaatgggcaa

SEQ ID NO: 7133 - DNA, 49 bp, Artificial Sequence
  Description of Artificial Sequence: Synthetic primer
  Description of Combined DNA/RNA Molecule: Synthetic primer
tgggtgcagaaaatgggcaagtggtggaagtgcttctccagcctgcagg

SEQ ID NO: 7134 - DNA, 43 bp, Artificial Sequence
  Description of Artificial Sequence: Synthetic primer
  Description of Combined DNA/RNA Molecule: Synthetic primer
acgacgacgacgaacaaggaggctgcatcacaaatccaaggcc

SEQ ID NO: 7135 - DNA, 43 bp, Artificial Sequence
  Description of Artificial Sequence: Synthetic primer
  Description of Combined DNA/RNA Molecule: Synthetic primer
acgacgacgacgaagaggctgcatcacaaatccaaggcugccg

SEQ ID NO: 7136 - DNA, 51 bp, Artificial Sequence
  Description of Artificial Sequence: Synthetic primer
  Description of Combined DNA/RNA Molecule: Synthetic primer
acgacgacgacttgacgaacataatctgcttctggagaggagtaccaagct

SEQ ID NO: 7137 - DNA, 49 bp, Artificial Sequence
  Description of Artificial Sequence: Synthetic oligonucleotide
  Description of Combined DNA/RNA Molecule: Synthetic oligonucleotide
tcggagagaggagccctaaacgccatccaactacagaggactcaucttg

SEQ ID NO: 7138 - DNA, 51 bp, Artificial Sequence
  Description of Artificial Sequence: Synthetic oligonucleotide
tctcatctattctccaagtgccccacagatgcgtttcctctgtgcggacca

SEQ ID NO: 7139 - DNA, 33 bp, Artificial Sequence
  Description of Artificial Sequence: Synthetic probe
ttggactcatctcatctattctccaagtgcccc

SEQ ID NO: 7140 - DNA, 21 bp, Artificial Sequence
  Description of Artificial Sequence: Synthetic primer
tcggagagaggagccctaaac

SEQ ID NO: 7141 - DNA, 19 bp, Artificial Sequence
  Description of Artificial Sequence: Synthetic primer
tggtccgcacagaggaaac

SEQ ID NO: 7142 - DNA, 47 bp, Artificial Sequence
  Description of Artificial Sequence: Synthetic primer
  Description of Combined DNA/RNA Molecule: Synthetic primer
tggtccgcacagaggaaactaccaagcccctgataggaggatggcac

SEQ ID NO: 7143 - DNA, 44 bp, Artificial Sequence; identical to SEQ ID NO: 2951
  Description of Artificial Sequence: Synthetic primer
  Description of Combined DNA/RNA Molecule: Synthetic primer

SEQ ID NO: 7144 - DNA, 44 bp, Artificial Sequence; identical to SEQ ID NO: 2952
  Description of Artificial Sequence: Synthetic primer
  Description of Combined DNA/RNA Molecule: Synthetic primer

SEQ ID NO: 7145 - DNA, 48 bp, Artificial Sequence; identical to SEQ ID NO: 2953
  Description of Artificial Sequence: Synthetic primer
  Description of Combined DNA/RNA Molecule: Synthetic primer

SEQ ID NO: 7146 - DNA, 47 bp, Artificial Sequence; identical to SEQ ID NO: 2954
  Description of Artificial Sequence: Synthetic oligonucleotide
  Description of Combined DNA/RNA Molecule: Synthetic oligonucleotide

SEQ ID NO: 7147 - DNA, 47 bp, Artificial Sequence; identical to SEQ ID NO: 2955
  Description of Artificial Sequence: Synthetic oligonucleotide

SEQ ID NO: 7148 - DNA, 22 bp, Artificial Sequence
  Description of Artificial Sequence: Synthetic probe
aatcccgcatcctggcacccag

SEQ ID NO: 7149 - DNA, 20 bp, Artificial Sequence
  Description of Artificial Sequence: Synthetic primer
tcgtcccggtcagtagtcaa

SEQ ID NO: 7150 - DNA, 20 bp, Artificial Sequence
  Description of Artificial Sequence: Synthetic primer
tgggtgcagaaaatgggcaa

SEQ ID NO: 7151 - DNA, 45 bp, Artificial Sequence; identical to SEQ ID NO: 2959
  Description of Artificial Sequence: Synthetic primer
  Description of Combined DNA/RNA Molecule: Synthetic primer

SEQ ID NO: 7152 - DNA, 50 bp, Artificial Sequence; identical to SEQ ID NO: 5692
  Description of Artificial Sequence: Synthetic primer
  Description of Combined DNA/RNA Molecule: Synthetic primer

SEQ ID NO: 7153 - DNA, 44 bp, Artificial Sequence; identical to SEQ ID NO: 5693
  Description of Artificial Sequence: Synthetic primer
  Description of Combined DNA/RNA Molecule: Synthetic primer

SEQ ID NO: 7154 - DNA, 57 bp, Artificial Sequence; identical to SEQ ID NO: 5694
  Description of Artificial Sequence: Synthetic primer
  Description of Combined DNA/RNA Molecule: Synthetic primer

SEQ ID NO: 7155 - DNA, 49 bp, Artificial Sequence; identical to SEQ ID NO: 5695
  Description of Artificial Sequence: Synthetic oligonucleotide
  Description of Combined DNA/RNA Molecule: Synthetic oligonucleotide

SEQ ID NO: 7156 - DNA, 46 bp, Artificial Sequence; identical to SEQ ID NO: 5696
  Description of Artificial Sequence: Synthetic oligonucleotide

SEQ ID NO: 7157 - DNA, 24 bp, Artificial Sequence
  Description of Artificial Sequence: Synthetic probe
tttgtgacaaagccacagggcagc

SEQ ID NO: 7158 - DNA, 21 bp, Artificial Sequence
  Description of Artificial Sequence: Synthetic primer
taatctccagacctccgaacc

SEQ ID NO: 7159 - DNA, 22 bp, Artificial Sequence
  Description of Artificial Sequence: Synthetic primer
tgtcccgttcaatccttacacc

SEQ ID NO: 7160 - DNA, 52 bp, Artificial Sequence; identical to SEQ ID NO: 5700
  Description of Artificial Sequence: Synthetic primer
  Description of Combined DNA/RNA Molecule: Synthetic primer

SEQ ID NO: 7161 - DNA, 41 bp, Artificial Sequence; identical to SEQ ID NO: 6155
  Description of Artificial Sequence: Synthetic primer
  Description of Combined DNA/RNA Molecule: Synthetic primer

SEQ ID NO: 7162 - DNA, 36 bp, Artificial Sequence; identical to SEQ ID NO: 6156
  Description of Artificial Sequence: Synthetic primer
  Description of Combined DNA/RNA Molecule: Synthetic primer

SEQ ID NO: 7163 - DNA, 50 bp, Artificial Sequence; identical to SEQ ID NO: 6157
  Description of Artificial Sequence: Synthetic primer
  Description of Combined DNA/RNA Molecule: Synthetic primer

SEQ ID NO: 7164 - DNA, 46 bp, Artificial Sequence; identical to SEQ ID NO: 6158
  Description of Artificial Sequence: Synthetic oligonucleotide
  Description of Combined DNA/RNA Molecule: Synthetic oligonucleotide

SEQ ID NO: 7165 - DNA, 59 bp, Artificial Sequence; identical to SEQ ID NO: 6159
  Description of Artificial Sequence: Synthetic oligonucleotide

SEQ ID NO: 7166 - DNA, 34 bp, Artificial Sequence; identical to SEQ ID NO: 6160
  Description of Artificial Sequence: Synthetic probe

SEQ ID NO: 7167 - DNA, 22 bp, Artificial Sequence
  Description of Artificial Sequence: Synthetic primer
tacgaatcacccgagagttcaa

SEQ ID NO: 7168 - DNA, 22 bp, Artificial Sequence
  Description of Artificial Sequence: Synthetic primer
tctgacctatacccacccacaa

SEQ ID NO: 7169 - DNA, 52 bp, Artificial Sequence; identical to SEQ ID NO: 6163
  Description of Artificial Sequence: Synthetic primer
  Description of Combined DNA/RNA Molecule: Synthetic primer

SEQ ID NO: 7170 - DNA, 47 bp, Artificial Sequence; identical to SEQ ID NO: 804
  Description of Artificial Sequence: Synthetic primer
  Description of Combined DNA/RNA Molecule: Synthetic primer

SEQ ID NO: 7171 - DNA, 44 bp, Artificial Sequence; identical to SEQ ID NO: 805
  Description of Artificial Sequence: Synthetic primer
  Description of Combined DNA/RNA Molecule: Synthetic primer

SEQ ID NO: 7172 - DNA, 54 bp, Artificial Sequence; identical to SEQ ID NO: 806
  Description of Artificial Sequence: Synthetic primer
  Description of Combined DNA/RNA Molecule: Synthetic primer

SEQ ID NO: 7173 - DNA, 44 bp, Artificial Sequence; identical to SEQ ID NO: 807
  Description of Artificial Sequence: Synthetic oligonucleotide
  Description of Combined DNA/RNA Molecule: Synthetic oligonucleotide

SEQ ID NO: 7174 - DNA, 49 bp, Artificial Sequence; identical to SEQ ID NO: 808
  Description of Artificial Sequence: Synthetic oligonucleotide

SEQ ID NO: 7175 - DNA, 24 bp, Artificial Sequence
  Description of Artificial Sequence: Synthetic probe
aaccccacaactcccagtgctgca

SEQ ID NO: 7176 - DNA, 19 bp, Artificial Sequence
  Description of Artificial Sequence: Synthetic primer
tccggaccttcatcctcca

SEQ ID NO: 7177 - DNA, 20 bp, Artificial Sequence
  Description of Artificial Sequence: Synthetic primer
tactatcgtgttcctgccca

SEQ ID NO: 7178 - DNA, 53 bp, Artificial Sequence; identical to SEQ ID NO: 812
  Description of Artificial Sequence: Synthetic primer
  Description of Combined DNA/RNA Molecule: Synthetic primer

SEQ ID NO: 7179 - DNA, 25 bp, Artificial Sequence
  Description of Artificial Sequence: Synthetic primer
  Description of Combined DNA/RNA Molecule: Synthetic primer
acgacgacgacttgacgaacataac

SEQ ID NO: 7180 - DNA, 43 bp, Artificial Sequence; identical to SEQ ID NO: 1110
  Description of Artificial Sequence: Synthetic primer
  Description of Combined DNA/RNA Molecule: Synthetic primer

SEQ ID NO: 7181 - DNA, 41 bp, Artificial Sequence; identical to SEQ ID NO: 1111
  Description of Artificial Sequence: Synthetic primer
  Description of Combined DNA/RNA Molecule: Synthetic primer

SEQ ID NO: 7182 - DNA, 52 bp, Artificial Sequence; identical to SEQ ID NO: 1112
  Description of Artificial Sequence: Synthetic primer
  Description of Combined DNA/RNA Molecule: Synthetic primer

SEQ ID NO: 7183 - DNA, 51 bp, Artificial Sequence; identical to SEQ ID NO: 1113
  Description of Artificial Sequence: Synthetic oligonucleotide
  Description of Combined DNA/RNA Molecule: Synthetic oligonucleotide

SEQ ID NO: 7184 - DNA, 54 bp, Artificial Sequence; identical to SEQ ID NO: 1114
  Description of Artificial Sequence: Synthetic oligonucleotide

SEQ ID NO: 7185 - DNA, 30 bp, Artificial Sequence; identical to SEQ ID NO: 1115
  Description of Artificial Sequence: Synthetic probe

SEQ ID NO: 7186 - DNA, 22 bp, Artificial Sequence
  Description of Artificial Sequence: Synthetic primer
tacgaatcacccgagagttcaa

SEQ ID NO: 7187 - DNA, 22 bp, Artificial Sequence
  Description of Artificial Sequence: Synthetic primer
tctgacctatacccacccacaa

SEQ ID NO: 7188 - DNA, 50 bp, Artificial Sequence; identical to SEQ ID NO: 1118
  Description of Artificial Sequence: Synthetic primer
  Description of Combined DNA/RNA Molecule: Synthetic primer

SEQ ID NO: 7189 - DNA, 41 bp, Artificial Sequence; identical to SEQ ID NO: 1163
  Description of Artificial Sequence: Synthetic primer
  Description of Combined DNA/RNA Molecule: Synthetic primer

SEQ ID NO: 7190 - DNA, 41 bp, Artificial Sequence; identical to SEQ ID NO: 1164
  Description of Artificial Sequence: Synthetic primer
  Description of Combined DNA/RNA Molecule: Synthetic primer

SEQ ID NO: 7191 - DNA, 48 bp, Artificial Sequence; identical to SEQ ID NO: 1165
  Description of Artificial Sequence: Synthetic primer
  Description of Combined DNA/RNA Molecule: Synthetic primer

SEQ ID NO: 7192 - DNA, 45 bp, Artificial Sequence; identical to SEQ ID NO: 1166
  Description of Artificial Sequence: Synthetic oligonucleotide
  Description of Combined DNA/RNA Molecule: Synthetic oligonucleotide

SEQ ID NO: 7193 - DNA, 44 bp, Artificial Sequence; identical to SEQ ID NO: 1167
  Description of Artificial Sequence: Synthetic oligonucleotide

SEQ ID NO: 7194 - DNA, 24 bp, Artificial Sequence
  Description of Artificial Sequence: Synthetic probe
aagagctcagtcagcagccaggca

SEQ ID NO: 7195 - DNA, 20 bp, Artificial Sequence
  Description of Artificial Sequence: Synthetic primer
tttgcctcttgtaggtgcca

SEQ ID NO: 7196 - DNA, 19 bp, Artificial Sequence
  Description of Artificial Sequence: Synthetic primer
tgaatatccgcgttgccca

SEQ ID NO: 7197 - DNA, 42 bp, Artificial Sequence; identical to SEQ ID NO: 1171
  Description of Artificial Sequence: Synthetic primer
  Description of Combined DNA/RNA Molecule: Synthetic primer

SEQ ID NO: 7198 - DNA, 36 bp, Artificial Sequence; identical to SEQ ID NO: 1595
  Description of Artificial Sequence: Synthetic primer
  Description of Combined DNA/RNA Molecule: Synthetic primer

SEQ ID NO: 7199 - DNA, 39 bp, Artificial Sequence; identical to SEQ ID NO: 1596
  Description of Artificial Sequence: Synthetic primer
  Description of Combined DNA/RNA Molecule: Synthetic primer

SEQ ID NO: 7200 - DNA, 54 bp, Artificial Sequence; identical to SEQ ID NO: 1597
  Description of Artificial Sequence: Synthetic primer
  Description of Combined DNA/RNA Molecule: Synthetic primer

SEQ ID NO: 7201 - DNA, 45 bp, Artificial Sequence; identical to SEQ ID NO: 1598
  Description of Artificial Sequence: Synthetic oligonucleotide
  Description of Combined DNA/RNA Molecule: Synthetic oligonucleotide

SEQ ID NO: 7202 - DNA, 52 bp, Artificial Sequence; identical to SEQ ID NO: 1599
  Description of Artificial Sequence: Synthetic oligonucleotide

SEQ ID NO: 7203 - DNA, 33 bp, Artificial Sequence; identical to SEQ ID NO: 1600
  Description of Artificial Sequence: Synthetic probe

SEQ ID NO: 7204 - DNA, 21 bp, Artificial Sequence
  Description of Artificial Sequence: Synthetic primer
tcacagagacttgccgatcac

SEQ ID NO: 7205 - DNA, 22 bp, Artificial Sequence
  Description of Artificial Sequence: Synthetic primer
tggccatgtctaagctacacac

SEQ ID NO: 7206 - DNA, 44 bp, Artificial Sequence; identical to SEQ ID NO: 1603
  Description of Artificial Sequence: Synthetic primer
  Description of Combined DNA/RNA Molecule: Synthetic primer

SEQ ID NO: 7207 - DNA, 37 bp, Artificial Sequence; identical to SEQ ID NO: 5208
  Description of Artificial Sequence: Synthetic primer
  Description of Combined DNA/RNA Molecule: Synthetic primer

SEQ ID NO: 7208 - DNA, 41 bp, Artificial Sequence; identical to SEQ ID NO: 5209
  Description of Artificial Sequence: Synthetic primer
  Description of Combined DNA/RNA Molecule: Synthetic primer

SEQ ID NO: 7209 - DNA, 51 bp, Artificial Sequence; identical to SEQ ID NO: 5210
  Description of Artificial Sequence: Synthetic primer
  Description of Combined DNA/RNA Molecule: Synthetic primer

SEQ ID NO: 7210 - DNA, 46 bp, Artificial Sequence; identical to SEQ ID NO: 5211
  Description of Artificial Sequence: Synthetic oligonucleotide
  Description of Combined DNA/RNA Molecule: Synthetic oligonucleotide

SEQ ID NO: 7211 - DNA, 41 bp, Artificial Sequence; identical to SEQ ID NO: 5212
  Description of Artificial Sequence: Synthetic oligonucleotide

SEQ ID NO: 7212 - DNA, 22 bp, Artificial Sequence
  Description of Artificial Sequence: Synthetic probe
ttaccatcacccccaccaccca

SEQ ID NO: 7213 - DNA, 22 bp, Artificial Sequence
  Description of Artificial Sequence: Synthetic primer
tacagatacggacgggaatcaa

SEQ ID NO: 7214 - DNA, 22 bp, Artificial Sequence
  Description of Artificial Sequence: Synthetic primer
tgacgcaggaggatgtaaacaa

SEQ ID NO: 7215 - DNA, 49 bp, Artificial Sequence; identical to SEQ ID NO: 5216
  Description of Artificial Sequence: Synthetic primer
  Description of Combined DNA/RNA Molecule: Synthetic primer

SEQ ID NO: 7216 - DNA, 38 bp, Artificial Sequence; identical to SEQ ID NO: 5217
  Description of Artificial Sequence: Synthetic primer
  Description of Combined DNA/RNA Molecule: Synthetic primer

SEQ ID NO: 7217 - DNA, 39 bp, Artificial Sequence; identical to SEQ ID NO: 5218
  Description of Artificial Sequence: Synthetic primer
  Description of Combined DNA/RNA Molecule: Synthetic primer

SEQ ID NO: 7218 - DNA, 51 bp, Artificial Sequence; identical to SEQ ID NO: 5219
  Description of Artificial Sequence: Synthetic primer
  Description of Combined DNA/RNA Molecule: Synthetic primer

SEQ ID NO: 7219 - DNA, 49 bp, Artificial Sequence; identical to SEQ ID NO: 5220
  Description of Artificial Sequence: Synthetic oligonucleotide
  Description of Combined DNA/RNA Molecule: Synthetic oligonucleotide

SEQ ID NO: 7220 - DNA, 45 bp, Artificial Sequence; identical to SEQ ID NO: 5221
  Description of Artificial Sequence: Synthetic oligonucleotide

SEQ ID NO: 7221 - DNA, 28 bp, Artificial Sequence
  Description of Artificial Sequence: Synthetic probe
ttcacttcatagctgcaggcaccaccac

SEQ ID NO: 7222 - DNA, 19 bp, Artificial Sequence
  Description of Artificial Sequence: Synthetic primer
ttggcgcaacggtttccaa

SEQ ID NO: 7223 - DNA, 22 bp, Artificial Sequence
  Description of Artificial Sequence: Synthetic primer
tgacgcaggaggatgtaaacaa

SEQ ID NO: 7224 - DNA, 53 bp, Artificial Sequence; identical to SEQ ID NO: 5225
  Description of Artificial Sequence: Synthetic primer
  Description of Combined DNA/RNA Molecule: Synthetic primer

SEQ ID NO: 7225 - DNA, 45 bp, Artificial Sequence; identical to SEQ ID NO: 363
  Description of Artificial Sequence: Synthetic primer
  Description of Combined DNA/RNA Molecule: Synthetic primer

SEQ ID NO: 7226 - DNA, 48 bp, Artificial Sequence; identical to SEQ ID NO: 5227
  Description of Artificial Sequence: Synthetic primer
  Description of Combined DNA/RNA Molecule: Synthetic primer

SEQ ID NO: 7227 - DNA, 51 bp, Artificial Sequence; identical to SEQ ID NO: 5228
  Description of Artificial Sequence: Synthetic oligonucleotide
  Description of Combined DNA/RNA Molecule: Synthetic oligonucleotide

SEQ ID NO: 7228 - DNA, 50 bp, Artificial Sequence; identical to SEQ ID NO: 5229
  Description of Artificial Sequence: Synthetic oligonucleotide

SEQ ID NO: 7229 - DNA, 31 bp, Artificial Sequence; identical to SEQ ID NO: 5230
  Description of Artificial Sequence: Synthetic probe

SEQ ID NO: 7230 - DNA, 19 bp, Artificial Sequence
  Description of Artificial Sequence: Synthetic primer
ttcagcagcctggcatcac

SEQ ID NO: 7231 - DNA, 19 bp, Artificial Sequence
  Description of Artificial Sequence: Synthetic primer
tgcaaccttagcgctccac

SEQ ID NO: 7232 - DNA, 43 bp, Artificial Sequence; identical to SEQ ID NO: 5233
  Description of Artificial Sequence: Synthetic primer
  Description of Combined DNA/RNA Molecule: Synthetic primer

SEQ ID NO: 7233 - DNA, 37 bp, Artificial Sequence; identical to SEQ ID NO: 5243
  Description of Artificial Sequence: Synthetic primer
  Description of Combined DNA/RNA Molecule: Synthetic primer

SEQ ID NO: 7234 - DNA, 38 bp, Artificial Sequence; identical to SEQ ID NO: 5244
  Description of Artificial Sequence: Synthetic primer
  Description of Combined DNA/RNA Molecule: Synthetic primer

SEQ ID NO: 7235 - DNA, 53 bp, Artificial Sequence; identical to SEQ ID NO: 5245
  Description of Artificial Sequence: Synthetic primer
  Description of Combined DNA/RNA Molecule: Synthetic primer

SEQ ID NO: 7236 - DNA, 46 bp, Artificial Sequence; identical to SEQ ID NO: 5246
  Description of Artificial Sequence: Synthetic oligonucleotide
  Description of Combined DNA/RNA Molecule: Synthetic oligonucleotide

SEQ ID NO: 7237 - DNA, 43 bp, Artificial Sequence; identical to SEQ ID NO: 5247
  Description of Artificial Sequence: Synthetic oligonucleotide

SEQ ID NO: 7238 - DNA, 23 bp, Artificial Sequence
  Description of Artificial Sequence: Synthetic probe
ttctgaacaggtggagctgcagc

SEQ ID NO: 7239 - DNA, 22 bp, Artificial Sequence
  Description of Artificial Sequence: Synthetic primer
tatcgcatcaaatggagagcaa

SEQ ID NO: 7240 - DNA, 22 bp, Artificial Sequence
  Description of Artificial Sequence: Synthetic primer
tgcaacgtataacagcggtcaa

SEQ ID NO: 7241 - DNA, 50 bp, Artificial Sequence; identical to SEQ ID NO: 5251
  Description of Artificial Sequence: Synthetic primer
  Description of Combined DNA/RNA Molecule: Synthetic primer

SEQ ID NO: 7242 - DNA, 38 bp, Artificial Sequence; identical to SEQ ID NO: 5279
  Description of Artificial Sequence: Synthetic primer
  Description of Combined DNA/RNA Molecule: Synthetic primer

SEQ ID NO: 7243 - DNA, 39 bp, Artificial Sequence; identical to SEQ ID NO: 5280
  Description of Artificial Sequence: Synthetic primer
  Description of Combined DNA/RNA Molecule: Synthetic primer

SEQ ID NO: 7244 - DNA, 46 bp, Artificial Sequence; identical to SEQ ID NO: 5281
  Description of Artificial Sequence: Synthetic primer
  Description of Combined DNA/RNA Molecule: Synthetic primer

SEQ ID NO: 7245 - DNA, 43 bp, Artificial Sequence; identical to SEQ ID NO: 5282
  Description of Artificial Sequence: Synthetic oligonucleotide
  Description of Combined DNA/RNA Molecule: Synthetic oligonucleotide

SEQ ID NO: 7246 - DNA, 41 bp, Artificial Sequence; identical to SEQ ID NO: 5283
  Description of Artificial Sequence: Synthetic oligonucleotide

SEQ ID NO: 7247 - DNA, 20 bp, Artificial Sequence
  Description of Artificial Sequence: Synthetic probe
ttagggccagggcacaggag

SEQ ID NO: 7248 - DNA, 20 bp, Artificial Sequence
  Description of Artificial Sequence: Synthetic primer
taccctcctagctccgtaca

SEQ ID NO: 7249 - DNA, 19 bp, Artificial Sequence
  Description of Artificial Sequence: Synthetic primer
tgcaccaccagacaacaca

SEQ ID NO: 7250 - DNA, 41 bp, Artificial Sequence; identical to SEQ ID NO: 5287
  Description of Artificial Sequence: Synthetic primer
  Description of Combined DNA/RNA Molecule: Synthetic primer

SEQ ID NO: 7251 - DNA, 48 bp, Artificial Sequence; identical to SEQ ID NO: 5288
  Description of Artificial Sequence: Synthetic primer
  Description of Combined DNA/RNA Molecule: Synthetic primer

SEQ ID NO: 7252 - DNA, 46 bp, Artificial Sequence; identical to SEQ ID NO: 5289
  Description of Artificial Sequence: Synthetic primer
  Description of Combined DNA/RNA Molecule: Synthetic primer

SEQ ID NO: 7253 - DNA, 52 bp, Artificial Sequence; identical to SEQ ID NO: 5290
  Description of Artificial Sequence: Synthetic primer
  Description of Combined DNA/RNA Molecule: Synthetic primer

SEQ ID NO: 7254 - DNA, 47 bp, Artificial Sequence; identical to SEQ ID NO: 5291
  Description of Artificial Sequence: Synthetic oligonucleotide
  Description of Combined DNA/RNA Molecule: Synthetic oligonucleotide

SEQ ID NO: 7255 - DNA, 50 bp, Artificial Sequence; identical to SEQ ID NO: 5292
  Description of Artificial Sequence: Synthetic oligonucleotide

SEQ ID NO: 7256 - DNA, 29 bp, Artificial Sequence
  Description of Artificial Sequence: Synthetic probe
aactcttcagcaggtagcacaccttgtcc

SEQ ID NO: 7257 - DNA, 21 bp, Artificial Sequence
  Description of Artificial Sequence: Synthetic primer
tcatcgccctcagatcttcca

SEQ ID NO: 7258 - DNA, 21 bp, Artificial Sequence
  Description of Artificial Sequence: Synthetic primer
tgccctccaatctatcctcca

SEQ ID NO: 7259 - DNA, 47 bp, Artificial Sequence; identical to SEQ ID NO: 5296
  Description of Artificial Sequence: Synthetic primer
  Description of Combined DNA/RNA Molecule: Synthetic primer

SEQ ID NO: 7260 - DNA, 41 bp, Artificial Sequence; identical to SEQ ID NO: 5297
  Description of Artificial Sequence: Synthetic primer
  Description of Combined DNA/RNA Molecule: Synthetic primer

SEQ ID NO: 7261 - DNA, 42 bp, Artificial Sequence; identical to SEQ ID NO: 5298
  Description of Artificial Sequence: Synthetic primer
  Description of Combined DNA/RNA Molecule: Synthetic primer

SEQ ID NO: 7262 - DNA, 51 bp, Artificial Sequence; identical to SEQ ID NO: 5299
  Description of Artificial Sequence: Synthetic primer
  Description of Combined DNA/RNA Molecule: Synthetic primer

SEQ ID NO: 7263 - DNA, 45 bp, Artificial Sequence; identical to SEQ ID NO: 5300
  Description of Artificial Sequence: Synthetic oligonucleotide
  Description of Combined DNA/RNA Molecule: Synthetic oligonucleotide

SEQ ID NO: 7264 - DNA, 46 bp, Artificial Sequence; identical to SEQ ID NO: 5301
  Description of Artificial Sequence: Synthetic oligonucleotide

SEQ ID NO: 7265 - DNA, 23 bp, Artificial Sequence
  Description of Artificial Sequence: Synthetic probe
ccgaggtcaggagtcagcccacc

SEQ ID NO: 7266 - DNA, 19 bp, Artificial Sequence
  Description of Artificial Sequence: Synthetic primer
taaccagttaccaccgcca

SEQ ID NO: 7267 - DNA, 21 bp, Artificial Sequence
  Description of Artificial Sequence: Synthetic primer
tgccctccaatctatcctcca

SEQ ID NO: 7268 - DNA, 49 bp, Artificial Sequence; identical to SEQ ID NO: 5305
  Description of Artificial Sequence: Synthetic primer
  Description of Combined DNA/RNA Molecule: Synthetic primer

SEQ ID NO: 7269 - DNA, 40 bp, Artificial Sequence; identical to SEQ ID NO: 5306
  Description of Artificial Sequence: Synthetic primer
  Description of Combined DNA/RNA Molecule: Synthetic primer

SEQ ID NO: 7270 - DNA, 40 bp, Artificial Sequence; identical to SEQ ID NO: 5307
  Description of Artificial Sequence: Synthetic primer
  Description of Combined DNA/RNA Molecule: Synthetic primer

SEQ ID NO: 7271 - DNA, 51 bp, Artificial Sequence; identical to SEQ ID NO: 5308
  Description of Artificial Sequence: Synthetic primer
  Description of Combined DNA/RNA Molecule: Synthetic primer

SEQ ID NO: 7272 - DNA, 50 bp, Artificial Sequence; identical to SEQ ID NO: 5309
  Description of Artificial Sequence: Synthetic oligonucleotide
  Description of Combined DNA/RNA Molecule: Synthetic oligonucleotide

SEQ ID NO: 7273 - DNA, 47 bp, Artificial Sequence; identical to SEQ ID NO: 5310
  Description of Artificial Sequence: Synthetic oligonucleotide

SEQ ID NO: 7274 - DNA, 28 bp, Artificial Sequence
  Description of Artificial Sequence: Synthetic probe
ttgcaaacaggcacaccagagaacccaa

SEQ ID NO: 7275 - DNA, 19 bp, Artificial Sequence
  Description of Artificial Sequence: Synthetic primer
tcgcaccggaattctgacc

SEQ ID NO: 7276 - DNA, 20 bp, Artificial Sequence
  Description of Artificial Sequence: Synthetic primer
tgccgtcatgggaaactacc

SEQ ID NO: 7277 - DNA, 45 bp, Artificial Sequence; identical to SEQ ID NO: 5314
  Description of Artificial Sequence: Synthetic primer
  Description of Combined DNA/RNA Molecule: Synthetic primer

SEQ ID NO: 7278 - DNA, 44 bp, Artificial Sequence; identical to SEQ ID NO: 5342
  Description of Artificial Sequence: Synthetic primer
  Description of Combined DNA/RNA Molecule: Synthetic primer

SEQ ID NO: 7279 - DNA, 49 bp, Artificial Sequence; identical to SEQ ID NO: 5343
  Description of Artificial Sequence: Synthetic primer
  Description of Combined DNA/RNA Molecule: Synthetic primer

SEQ ID NO: 7280 - DNA, 48 bp, Artificial Sequence; identical to SEQ ID NO: 5344
  Description of Artificial Sequence: Synthetic primer
  Description of Combined DNA/RNA Molecule: Synthetic primer

SEQ ID NO: 7281 - DNA, 44 bp, Artificial Sequence; identical to SEQ ID NO: 5345
  Description of Artificial Sequence: Synthetic oligonucleotide
  Description of Combined DNA/RNA Molecule: Synthetic oligonucleotide

SEQ ID NO: 7282 - DNA, 41 bp, Artificial Sequence; identical to SEQ ID NO: 5346
  Description of Artificial Sequence: Synthetic oligonucleotide

SEQ ID NO: 7283 - DNA, 25 bp, Artificial Sequence
  Description of Artificial Sequence: Synthetic probe
tttcctacagccagtgcctccacac

SEQ ID NO: 7284 - DNA, 19 bp, Artificial Sequence
  Description of Artificial Sequence: Synthetic primer
ttcgcctaccgcagtgaac

SEQ ID NO: 7285 - DNA, 19 bp, Artificial Sequence
  Description of Artificial Sequence: Synthetic primer
tgcgagcccatgtctcaac

SEQ ID NO: 7286 - DNA, 44 bp, Artificial Sequence; identical to SEQ ID NO: 5350
  Description of Artificial Sequence: Synthetic primer
  Description of Combined DNA/RNA Molecule: Synthetic primer

SEQ ID NO: 7287 - DNA, 45 bp, Artificial Sequence; identical to SEQ ID NO: 5351
  Description of Artificial Sequence: Synthetic primer
  Description of Combined DNA/RNA Molecule: Synthetic primer

SEQ ID NO: 7288 - DNA, 46 bp, Artificial Sequence; identical to SEQ ID NO: 5352
  Description of Artificial Sequence: Synthetic primer
  Description of Combined DNA/RNA Molecule: Synthetic primer

SEQ ID NO: 7289 - DNA, 53 bp, Artificial Sequence; identical to SEQ ID NO: 5353
  Description of Artificial Sequence: Synthetic primer
  Description of Combined DNA/RNA Molecule: Synthetic primer

SEQ ID NO: 7290 - DNA, 56 bp, Artificial Sequence; identical to SEQ ID NO: 5354
  Description of Artificial Sequence: Synthetic oligonucleotide
  Description of Combined DNA/RNA Molecule: Synthetic oligonucleotide

SEQ ID NO: 7291 - DNA, 44 bp, Artificial Sequence; identical to SEQ ID NO: 5355
  Description of Artificial Sequence: Synthetic oligonucleotide

SEQ ID NO: 7292 - DNA, 26 bp, Artificial Sequence
  Description of Artificial Sequence: Synthetic probe
ttaactccagcccacttctccaaggg

SEQ ID NO: 7293 - DNA, 21 bp, Artificial Sequence
  Description of Artificial Sequence: Synthetic primer
ttgcatttcgttagcgacaca

SEQ ID NO: 7294 - DNA, 20 bp, Artificial Sequence
  Description of Artificial Sequence: Synthetic primer
tgcgggtagatcgactcaca

SEQ ID NO: 7295 - DNA, 51 bp, Artificial Sequence; identical to SEQ ID NO: 5359
  Description of Artificial Sequence: Synthetic primer
  Description of Combined DNA/RNA Molecule: Synthetic primer

SEQ ID NO: 7296 - DNA, 41 bp, Artificial Sequence; identical to SEQ ID NO: 5378
  Description of Artificial Sequence: Synthetic primer
  Description of Combined DNA/RNA Molecule: Synthetic primer

SEQ ID NO: 7297 - DNA, 41 bp, Artificial Sequence; identical to SEQ ID NO: 5379
  Description of Artificial Sequence: Synthetic primer
  Description of Combined DNA/RNA Molecule: Synthetic primer

SEQ ID NO: 7298 - DNA, 54 bp, Artificial Sequence; identical to SEQ ID NO: 5380
  Description of Artificial Sequence: Synthetic primer
  Description of Combined DNA/RNA Molecule: Synthetic primer

SEQ ID NO: 7299 - DNA, 49 bp, Artificial Sequence; identical to SEQ ID NO: 5381
  Description of Artificial Sequence: Synthetic oligonucleotide
  Description of Combined DNA/RNA Molecule: Synthetic oligonucleotide

SEQ ID NO: 7300 - DNA, 54 bp, Artificial Sequence; identical to SEQ ID NO: 5382
  Description of Artificial Sequence: Synthetic oligonucleotide

SEQ ID NO: 7301 - DNA, 26 bp, Artificial Sequence
  Description of Artificial Sequence: Synthetic probe
ttggacgcaagagaaggcagcaccac

SEQ ID NO: 7302 - DNA, 22 bp, Artificial Sequence
  Description of Artificial Sequence: Synthetic primer
tctcatgggcgctagtatcaac

SEQ ID NO: 7303 - DNA, 22 bp, Artificial Sequence
  Description of Artificial Sequence: Synthetic primer
tgcgggtatcaatcagggaaac

SEQ ID NO: 7304 - DNA, 44 bp, Artificial Sequence; identical to SEQ ID NO: 5386
  Description of Artificial Sequence: Synthetic primer
  Description of Combined DNA/RNA Molecule: Synthetic primer

SEQ ID NO: 7305 - DNA, 41 bp, Artificial Sequence; identical to SEQ ID NO: 5387
  Description of Artificial Sequence: Synthetic primer
  Description of Combined DNA/RNA Molecule: Synthetic primer

SEQ ID NO: 7306 - DNA, 42 bp, Artificial Sequence; identical to SEQ ID NO: 5388
  Description of Artificial Sequence: Synthetic primer
  Description of Combined DNA/RNA Molecule: Synthetic primer

SEQ ID NO: 7307 - DNA, 49 bp, Artificial Sequence; identical to SEQ ID NO: 5389
  Description of Artificial Sequence: Synthetic primer
  Description of Combined DNA/RNA Molecule: Synthetic primer

SEQ ID NO: 7308 - DNA, 46 bp, Artificial Sequence; identical to SEQ ID NO: 5390
  Description of Artificial Sequence: Synthetic oligonucleotide
  Description of Combined DNA/RNA Molecule: Synthetic oligonucleotide

SEQ ID NO: 7309 - DNA, 49 bp, Artificial Sequence; identical to SEQ ID NO: 5391
  Description of Artificial Sequence: Synthetic oligonucleotide

SEQ ID NO: 7310 - DNA, 29 bp, Artificial Sequence
  Description of Artificial Sequence: Synthetic probe
ttaggaacaacaggcaacattggtaggga

SEQ ID NO: 7311 - DNA, 21 bp, Artificial Sequence
  Description of Artificial Sequence: Synthetic primer
tggatcgagacggaatgcaac

SEQ ID NO: 7312 - DNA, 22 bp, Artificial Sequence
  Description of Artificial Sequence: Synthetic primer
tgcgggtatcaatcagggaaac

SEQ ID NO: 7313 - DNA, 50 bp, Artificial Sequence; identical to SEQ ID NO: 5395
  Description of Artificial Sequence: Synthetic primer
  Description of Combined DNA/RNA Molecule: Synthetic primer

SEQ ID NO: 7314 - DNA, 48 bp, Artificial Sequence; identical to SEQ ID NO: 5405
  Description of Artificial Sequence: Synthetic primer
  Description of Combined DNA/RNA Molecule: Synthetic primer

SEQ ID NO: 7315 - DNA, 45 bp, Artificial Sequence; identical to SEQ ID NO: 5406
  Description of Artificial Sequence: Synthetic primer
  Description of Combined DNA/RNA Molecule: Synthetic primer

SEQ ID NO: 7316 - DNA, 46 bp, Artificial Sequence; identical to SEQ ID NO: 5407
  Description of Artificial Sequence: Synthetic primer
  Description of Combined DNA/RNA Molecule: Synthetic primer

SEQ ID NO: 7317 - DNA, 47 bp, Artificial Sequence; identical to SEQ ID NO: 5408
  Description of Artificial Sequence: Synthetic oligonucleotide
  Description of Combined DNA/RNA Molecule: Synthetic oligonucleotide

SEQ ID NO: 7318 - DNA, 42 bp, Artificial Sequence; identical to SEQ ID NO: 5409
  Description of Artificial Sequence: Synthetic oligonucleotide

SEQ ID NO: 7319 - DNA, 23 bp, Artificial Sequence
  Description of Artificial Sequence: Synthetic probe
ttactctcacacctgccagcccc

SEQ ID NO: 7320 - DNA, 22 bp, Artificial Sequence
  Description of Artificial Sequence: Synthetic primer
taagcctgcttttccgaaacaa

SEQ ID NO: 7321 - DNA, 21 bp, Artificial Sequence
  Description of Artificial Sequence: Synthetic primer
tgctatcctggcgcaatacaa

SEQ ID NO: 7322 - DNA, 45 bp, Artificial Sequence; identical to SEQ ID NO: 5413
  Description of Artificial Sequence: Synthetic primer
  Description of Combined DNA/RNA Molecule: Synthetic primer

SEQ ID NO: 7323 - DNA, 38 bp, Artificial Sequence; identical to SEQ ID NO: 5414
  Description of Artificial Sequence: Synthetic primer
  Description of Combined DNA/RNA Molecule: Synthetic primer

SEQ ID NO: 7324 - DNA, 39 bp, Artificial Sequence; identical to SEQ ID NO: 5415
  Description of Artificial Sequence: Synthetic primer
  Description of Combined DNA/RNA Molecule: Synthetic primer

SEQ ID NO: 7325 - DNA, 56 bp, Artificial Sequence; identical to SEQ ID NO: 5416
  Description of Artificial Sequence: Synthetic primer
  Description of Combined DNA/RNA Molecule: Synthetic primer

SEQ ID NO: 7326 - DNA, 48 bp, Artificial Sequence; identical to SEQ ID NO: 5417
  Description of Artificial Sequence: Synthetic oligonucleotide
  Description of Combined DNA/RNA Molecule: Synthetic oligonucleotide

SEQ ID NO: 7327 - DNA, 46 bp, Artificial Sequence; identical to SEQ ID NO: 5418
  Description of Artificial Sequence: Synthetic oligonucleotide

SEQ ID NO: 7328 - DNA, 20 bp, Artificial Sequence
  Description of Artificial Sequence: Synthetic probe
ttagccccaggtcagcccag

SEQ ID NO: 7329 - DNA, 19 bp, Artificial Sequence
  Description of Artificial Sequence: Synthetic primer
ttggcaactctccacccaa

SEQ ID NO: 7330 - DNA, 21 bp, Artificial Sequence
  Description of Artificial Sequence: Synthetic primer
tgctatcctggcgcaatacaa

SEQ ID NO: 7331 - DNA, 50 bp, Artificial Sequence; identical to SEQ ID NO: 5422
  Description of Artificial Sequence: Synthetic primer
  Description of Combined DNA/RNA Molecule: Synthetic primer

SEQ ID NO: 7332 - DNA, 46 bp, Artificial Sequence; identical to SEQ ID NO: 5442
  Description of Artificial Sequence: Synthetic primer
  Description of Combined DNA/RNA Molecule: Synthetic primer

SEQ ID NO: 7333 - DNA, 44 bp, Artificial Sequence; identical to SEQ ID NO: 5443
  Description of Artificial Sequence: Synthetic primer
  Description of Combined DNA/RNA Molecule: Synthetic primer

SEQ ID NO: 7334 - DNA, 50 bp, Artificial Sequence; identical to SEQ ID NO: 5444
  Description of Artificial Sequence: Synthetic primer
  Description of Combined DNA/RNA Molecule: Synthetic primer

SEQ ID NO: 7335 - DNA, 48 bp, Artificial Sequence; identical to SEQ ID NO: 5445
  Description of Artificial Sequence: Synthetic oligonucleotide
  Description of Combined DNA/RNA Molecule: Synthetic oligonucleotide

SEQ ID NO: 7336 - DNA, 47 bp, Artificial Sequence; identical to SEQ ID NO: 5446
  Description of Artificial Sequence: Synthetic oligonucleotide

SEQ ID NO: 7337 - DNA, 25 bp, Artificial Sequence
  Description of Artificial Sequence: Synthetic probe
ttcaccgcaagcacctcatcccctc

SEQ ID NO: 7338 - DNA, 19 bp, Artificial Sequence
  Description of Artificial Sequence: Synthetic primer
ttgcacccgcgacataacc

SEQ ID NO: 7339 - DNA, 22 bp, Artificial Sequence
  Description of Artificial Sequence: Synthetic primer
tgctccgttcgagtgaattacc

SEQ ID NO: 7340 - DNA, 45 bp, Artificial Sequence; identical to SEQ ID NO: 5450
  Description of Artificial Sequence: Synthetic primer
  Description of Combined DNA/RNA Molecule: Synthetic primer

SEQ ID NO: 7341 - DNA, 40 bp, Artificial Sequence; identical to SEQ ID NO: 5460
  Description of Artificial Sequence: Synthetic primer
  Description of Combined DNA/RNA Molecule: Synthetic primer

SEQ ID NO: 7342 - DNA, 42 bp, Artificial Sequence; identical to SEQ ID NO: 5461
  Description of Artificial Sequence: Synthetic primer
  Description of Combined DNA/RNA Molecule: Synthetic primer

SEQ ID NO: 7343 - DNA, 47 bp, Artificial Sequence; identical to SEQ ID NO: 5462
  Description of Artificial Sequence: Synthetic primer
  Description of Combined DNA/RNA Molecule: Synthetic primer

SEQ ID NO: 7344 - DNA, 58 bp, Artificial Sequence; identical to SEQ ID NO: 5463
  Description of Artificial Sequence: Synthetic oligonucleotide
  Description of Combined DNA/RNA Molecule: Synthetic oligonucleotide

SEQ ID NO: 7345 - DNA, 51 bp, Artificial Sequence; identical to SEQ ID NO: 5464
  Description of Artificial Sequence: Synthetic oligonucleotide

SEQ ID NO: 7346 - DNA, 33 bp, Artificial Sequence; identical to SEQ ID NO: 5465
  Description of Artificial Sequence: Synthetic probe

SEQ ID NO: 7347 - DNA, 20 bp, Artificial Sequence
  Description of Artificial Sequence: Synthetic primer
tcgcggaaagtcccagtaac

SEQ ID NO: 7348 - DNA, 20 bp, Artificial Sequence
  Description of Artificial Sequence: Synthetic primer
tggaacgcttacaggccaac

SEQ ID NO: 7349 - DNA, 48 bp, Artificial Sequence; identical to SEQ ID NO: 5468
  Description of Artificial Sequence: Synthetic primer
  Description of Combined DNA/RNA Molecule: Synthetic primer

SEQ ID NO: 7350 - DNA, 41 bp, Artificial Sequence; identical to SEQ ID NO: 5469
  Description of Artificial Sequence: Synthetic primer
  Description of Combined DNA/RNA Molecule: Synthetic primer

SEQ ID NO: 7351 - DNA, 39 bp, Artificial Sequence; identical to SEQ ID NO: 5470
  Description of Artificial Sequence: Synthetic primer
  Description of Combined DNA/RNA Molecule: Synthetic primer

SEQ ID NO: 7352 - DNA, 55 bp, Artificial Sequence; identical to SEQ ID NO: 5471
  Description of Artificial Sequence: Synthetic primer
  Description of Combined DNA/RNA Molecule: Synthetic primer

SEQ ID NO: 7353 - DNA, 45 bp, Artificial Sequence; identical to SEQ ID NO: 5472
  Description of Artificial Sequence: Synthetic oligonucleotide
  Description of Combined DNA/RNA Molecule: Synthetic oligonucleotide

SEQ ID NO: 7354 - DNA, 45 bp, Artificial Sequence; identical to SEQ ID NO: 5473
  Description of Artificial Sequence: Synthetic oligonucleotide

SEQ ID NO: 7355 - DNA, 24 bp, Artificial Sequence
  Description of Artificial Sequence: Synthetic probe
tttgccccagcactctgctcctac

SEQ ID NO: 7356 - DNA, 21 bp, Artificial Sequence
  Description of Artificial Sequence: Synthetic primer
tgaacgctcaaacacgtgaac

SEQ ID NO: 7357 - DNA, 20 bp, Artificial Sequence
  Description of Artificial Sequence: Synthetic primer
tggaacgcttacaggccaac

SEQ ID NO: 7358 - DNA, 50 bp, Artificial Sequence; identical to SEQ ID NO: 5477
  Description of Artificial Sequence: Synthetic primer
  Description of Combined DNA/RNA Molecule: Synthetic primer

SEQ ID NO: 7359 - DNA, 42 bp, Artificial Sequence; identical to SEQ ID NO: 5487
  Description of Artificial Sequence: Synthetic primer
  Description of Combined DNA/RNA Molecule: Synthetic primer

SEQ ID NO: 7360 - DNA, 43 bp, Artificial Sequence; identical to SEQ ID NO: 5488
  Description of Artificial Sequence: Synthetic primer
  Description of Combined DNA/RNA Molecule: Synthetic primer

SEQ ID NO: 7361 - DNA, 52 bp, Artificial Sequence; identical to SEQ ID NO: 5489
  Description of Artificial Sequence: Synthetic primer
  Description of Combined DNA/RNA Molecule: Synthetic primer

SEQ ID NO: 7362 - DNA, 46 bp, Artificial Sequence; identical to SEQ ID NO: 5490
  Description of Artificial Sequence: Synthetic oligonucleotide
  Description of Combined DNA/RNA Molecule: Synthetic oligonucleotide

SEQ ID NO: 7363 - DNA, 49 bp, Artificial Sequence; identical to SEQ ID NO: 5491
  Description of Artificial Sequence: Synthetic oligonucleotide

SEQ ID NO: 7364 - DNA, 26 bp, Artificial Sequence
  Description of Artificial Sequence: Synthetic probe
ttagcaacatccagctcccacacctc

SEQ ID NO: 7365 - DNA, 22 bp, Artificial Sequence
  Description of Artificial Sequence: Synthetic primer
tcgatggtcaatgagcttcaca

SEQ ID NO: 7366 - DNA, 22 bp, Artificial Sequence
  Description of Artificial Sequence: Synthetic primer
tggagagggagatcacgtaaca

SEQ ID NO: 7367 - DNA, 48 bp, Artificial Sequence; identical to SEQ ID NO: 5495
  Description of Artificial Sequence: Synthetic primer
  Description of Combined DNA/RNA Molecule: Synthetic primer

SEQ ID NO: 7368 - DNA, 39 bp, Artificial Sequence; identical to SEQ ID NO: 5540
  Description of Artificial Sequence: Synthetic primer
  Description of Combined DNA/RNA Molecule: Synthetic primer

SEQ ID NO: 7369 - DNA, 40 bp, Artificial Sequence; identical to SEQ ID NO: 5541
  Description of Artificial Sequence: Synthetic primer
  Description of Combined DNA/RNA Molecule: Synthetic primer

SEQ ID NO: 7370 - DNA, 51 bp, Artificial Sequence; identical to SEQ ID NO: 5542
  Description of Artificial Sequence: Synthetic primer
  Description of Combined DNA/RNA Molecule: Synthetic primer

SEQ ID NO: 7371 - DNA, 49 bp, Artificial Sequence; identical to SEQ ID NO: 5543
  Description of Artificial Sequence: Synthetic oligonucleotide
  Description of Combined DNA/RNA Molecule: Synthetic oligonucleotide

SEQ ID NO: 7372 - DNA, 41 bp, Artificial Sequence; identical to SEQ ID NO: 5544
  Description of Artificial Sequence: Synthetic oligonucleotide

SEQ ID NO: 7373 - DNA, 23 bp, Artificial Sequence
  Description of Artificial Sequence: Synthetic probe
aaagcaacagggcagaggtcagg

SEQ ID NO: 7374 - DNA, 22 bp, Artificial Sequence
  Description of Artificial Sequence: Synthetic primer
tgatgctggcaaaccctagaac

SEQ ID NO: 7375 - DNA, 20 bp, Artificial Sequence
  Description of Artificial Sequence: Synthetic primer
tggcctaacggtgatggaac

SEQ ID NO: 7376 - DNA, 46 bp, Artificial Sequence; identical to SEQ ID NO: 5548
  Description of Artificial Sequence: Synthetic primer
  Description of Combined DNA/RNA Molecule: Synthetic primer

SEQ ID NO: 7377 - DNA, 35 bp, Artificial Sequence; identical to SEQ ID NO: 5549
  Description of Artificial Sequence: Synthetic primer
  Description of Combined DNA/RNA Molecule: Synthetic primer

SEQ ID NO: 7378 - DNA, 38 bp, Artificial Sequence; identical to SEQ ID NO: 5550
  Description of Artificial Sequence: Synthetic primer
  Description of Combined DNA/RNA Molecule: Synthetic primer

SEQ ID NO: 7379 - DNA, 58 bp, Artificial Sequence; identical to SEQ ID NO: 5551
  Description of Artificial Sequence: Synthetic primer
  Description of Combined DNA/RNA Molecule: Synthetic primer

SEQ ID NO: 7380 - DNA, 48 bp, Artificial Sequence; identical to SEQ ID NO: 5552
  Description of Artificial Sequence: Synthetic oligonucleotide
  Description of Combined DNA/RNA Molecule: Synthetic oligonucleotide

SEQ ID NO: 7381 - DNA, 53 bp, Artificial Sequence; identical to SEQ ID NO: 5553
  Description of Artificial Sequence: Synthetic oligonucleotide

SEQ ID NO: 7382 - DNA, 29 bp, Artificial Sequence
  Description of Artificial Sequence: Synthetic probe
aacaccgcactggagtaccctgcacataa

SEQ ID NO: 7383 - DNA, 19 bp, Artificial Sequence
  Description of Artificial Sequence: Synthetic primer
ttttcggcatccgcttcca

SEQ ID NO: 7384 - DNA, 21 bp, Artificial Sequence
  Description of Artificial Sequence: Synthetic primer
tggcctgtcctctgttaacca

SEQ ID NO: 7385 - DNA, 53 bp, Artificial Sequence; identical to SEQ ID NO: 5557
  Description of Artificial Sequence: Synthetic primer
  Description of Combined DNA/RNA Molecule: Synthetic primer

SEQ ID NO: 7386 - DNA, 51 bp, Artificial Sequence; identical to SEQ ID NO: 5602
  Description of Artificial Sequence: Synthetic primer
  Description of Combined DNA/RNA Molecule: Synthetic primer

SEQ ID NO: 7387 - DNA, 48 bp, Artificial Sequence; identical to SEQ ID NO: 5603
  Description of Artificial Sequence: Synthetic primer
  Description of Combined DNA/RNA Molecule: Synthetic primer

SEQ ID NO: 7388 - DNA, 56 bp, Artificial Sequence; identical to SEQ ID NO: 5604
  Description of Artificial Sequence: Synthetic primer
  Description of Combined DNA/RNA Molecule: Synthetic primer

SEQ ID NO: 7389 - DNA, 48 bp, Artificial Sequence; identical to SEQ ID NO: 5605
  Description of Artificial Sequence: Synthetic oligonucleotide
  Description of Combined DNA/RNA Molecule: Synthetic oligonucleotide

SEQ ID NO: 7390 - DNA, 61 bp, Artificial Sequence; identical to SEQ ID NO: 5606
  Description of Artificial Sequence: Synthetic oligonucleotide

SEQ ID NO: 7391 - DNA, 33 bp, Artificial Sequence; identical to SEQ ID NO: 5607
  Description of Artificial Sequence: Synthetic probe

SEQ ID NO: 7392 - DNA, 20 bp, Artificial Sequence
  Description of Artificial Sequence: Synthetic primer
tcgtcccggtcagtagtcaa

SEQ ID NO: 7393 - DNA, 20 bp, Artificial Sequence
  Description of Artificial Sequence: Synthetic primer
tgggtgcagaaaatgggcaa

SEQ ID NO: 7394 - DNA, 50 bp, Artificial Sequence; identical to SEQ ID NO: 5610
  Description of Artificial Sequence: Synthetic primer
  Description of Combined DNA/RNA Molecule: Synthetic primer

SEQ ID NO: 7395 - DNA, 42 bp, Artificial Sequence; identical to SEQ ID NO: 5638
  Description of Artificial Sequence: Synthetic primer
  Description of Combined DNA/RNA Molecule: Synthetic primer

SEQ ID NO: 7396 - DNA, 40 bp, Artificial Sequence; identical to SEQ ID NO: 5639
  Description of Artificial Sequence: Synthetic primer
  Description of Combined DNA/RNA Molecule: Synthetic primer

SEQ ID NO: 7397 - DNA, 53 bp, Artificial Sequence; identical to SEQ ID NO: 5640
  Description of Artificial Sequence: Synthetic primer
  Description of Combined DNA/RNA Molecule: Synthetic primer

SEQ ID NO: 7398 - DNA, 46 bp, Artificial Sequence; identical to SEQ ID NO: 5641
  Description of Artificial Sequence: Synthetic oligonucleotide
  Description of Combined DNA/RNA Molecule: Synthetic oligonucleotide

SEQ ID NO: 7399 - DNA, 45 bp, Artificial Sequence; identical to SEQ ID NO: 5642
  Description of Artificial Sequence: Synthetic oligonucleotide

SEQ ID NO: 7400 - DNA, 28 bp, Artificial Sequence
  Description of Artificial Sequence: Synthetic probe
aaacagacagccaccagctgaatgaagc

SEQ ID NO: 7401 - DNA, 21 bp, Artificial Sequence
  Description of Artificial Sequence: Synthetic primer
tcacgcacgtagggtctaaac

SEQ ID NO: 7402 - DNA, 20 bp, Artificial Sequence
  Description of Artificial Sequence: Synthetic primer
tgtaaccacagccggacaac

SEQ ID NO: 7403 - DNA, 47 bp, Artificial Sequence; identical to SEQ ID NO: 5646
  Description of Artificial Sequence: Synthetic primer
  Description of Combined DNA/RNA Molecule: Synthetic primer

SEQ ID NO: 7404 - DNA, 35 bp, Artificial Sequence; identical to SEQ ID NO: 5877
  Description of Artificial Sequence: Synthetic primer
  Description of Combined DNA/RNA Molecule: Synthetic primer

SEQ ID NO: 7405 - DNA, 44 bp, Artificial Sequence; identical to SEQ ID NO: 5878
  Description of Artificial Sequence: Synthetic primer
  Description of Combined DNA/RNA Molecule: Synthetic primer

SEQ ID NO: 7406 - DNA, 58 bp, Artificial Sequence; identical to SEQ ID NO: 5879
  Description of Artificial Sequence: Synthetic primer
  Description of Combined DNA/RNA Molecule: Synthetic primer

SEQ ID NO: 7407 - DNA, 42 bp, Artificial Sequence; identical to SEQ ID NO: 5880
  Description of Artificial Sequence: Synthetic oligonucleotide
  Description of Combined DNA/RNA Molecule: Synthetic oligonucleotide

SEQ ID NO: 7408 - DNA, 57 bp, Artificial Sequence; identical to SEQ ID NO: 5881
  Description of Artificial Sequence: Synthetic oligonucleotide

SEQ ID NO: 7409 - DNA, 36 bp, Artificial Sequence; identical to SEQ ID NO: 5882
  Description of Artificial Sequence: Synthetic probe

SEQ ID NO: 7410 - DNA, 19 bp, Artificial Sequence
  Description of Artificial Sequence: Synthetic primer
tttcgctcgacgcatacca

SEQ ID NO: 7411 - DNA, 19 bp, Artificial Sequence
  Description of Artificial Sequence: Synthetic primer
ttttacagtagccgcgcca

SEQ ID NO: 7412 - DNA, 49 bp, Artificial Sequence; identical to SEQ ID NO: 5885
  Description of Artificial Sequence: Synthetic primer
  Description of Combined DNA/RNA Molecule: Synthetic primer

SEQ ID NO: 7413 - DNA, 42 bp, Artificial Sequence; identical to SEQ ID NO: 5949
  Description of Artificial Sequence: Synthetic primer
  Description of Combined DNA/RNA Molecule: Synthetic primer

SEQ ID NO: 7414 - DNA, 44 bp, Artificial Sequence; identical to SEQ ID NO: 5950
  Description of Artificial Sequence: Synthetic primer
  Description of Combined DNA/RNA Molecule: Synthetic primer

SEQ ID NO: 7415 - DNA, 50 bp, Artificial Sequence; identical to SEQ ID NO: 5951
  Description of Artificial Sequence: Synthetic primer
  Description of Combined DNA/RNA Molecule: Synthetic primer

SEQ ID NO: 7416 - DNA, 52 bp, Artificial Sequence; identical to SEQ ID NO: 5952
  Description of Artificial Sequence: Synthetic oligonucleotide
  Description of Combined DNA/RNA Molecule: Synthetic oligonucleotide

SEQ ID NO: 7417 - DNA, 50 bp, Artificial Sequence; identical to SEQ ID NO: 5953
  Description of Artificial Sequence: Synthetic oligonucleotide

SEQ ID NO: 7418 - DNA, 33 bp, Artificial Sequence; identical to SEQ ID NO: 5954
  Description of Artificial Sequence: Synthetic probe

SEQ ID NO: 7419 - DNA, 22 bp, Artificial Sequence
  Description of Artificial Sequence: Synthetic primer
tccaaacaagctgatccgtaca

SEQ ID NO: 7420 - DNA, 19 bp, Artificial Sequence
  Description of Artificial Sequence: Synthetic primer
tagtaaccgctccgacaca

SEQ ID NO: 7421 - DNA, 45 bp, Artificial Sequence; identical to SEQ ID NO: 5957
  Description of Artificial Sequence: Synthetic primer
  Description of Combined DNA/RNA Molecule: Synthetic primer

SEQ ID NO: 7422 - DNA, 37 bp, Artificial Sequence; identical to SEQ ID NO: 6245
  Description of Artificial Sequence: Synthetic primer
  Description of Combined DNA/RNA Molecule: Synthetic primer

SEQ ID NO: 7423 - DNA, 38 bp, Artificial Sequence; identical to SEQ ID NO: 6246
  Description of Artificial Sequence: Synthetic primer
  Description of Combined DNA/RNA Molecule: Synthetic primer

SEQ ID NO: 7424 - DNA, 59 bp, Artificial Sequence; identical to SEQ ID NO: 6247
  Description of Artificial Sequence: Synthetic primer
  Description of Combined DNA/RNA Molecule: Synthetic primer

SEQ ID NO: 7425 - DNA, 48 bp, Artificial Sequence; identical to SEQ ID NO: 6248
  Description of Artificial Sequence: Synthetic oligonucleotide
  Description of Combined DNA/RNA Molecule: Synthetic oligonucleotide

SEQ ID NO: 7426 - DNA, 50 bp, Artificial Sequence; identical to SEQ ID NO: 6249
  Description of Artificial Sequence: Synthetic oligonucleotide

SEQ ID NO: 7427 - DNA, 28 bp, Artificial Sequence
  Description of Artificial Sequence: Synthetic probe
aaaccatcaccaccaccagcattgtgaa

SEQ ID NO: 7428 - DNA, 19 bp, Artificial Sequence
  Description of Artificial Sequence: Synthetic primer
tagacacgagcgaggtcac

SEQ ID NO: 7429 - DNA, 21 bp, Artificial Sequence
  Description of Artificial Sequence: Synthetic primer
tgcacagcctgaattttgcac

SEQ ID NO: 7430 - DNA, 52 bp, Artificial Sequence; identical to SEQ ID NO: 6253
  Description of Artificial Sequence: Synthetic primer
  Description of Combined DNA/RNA Molecule: Synthetic primer

SEQ ID NO: 7431 - DNA, 42 bp, Artificial Sequence
  Description of Artificial Sequence: Synthetic primer
  Description of Combined DNA/RNA Molecule: Synthetic primer
acgacgacgacgaagcccagtgaggagtgaattagcaccctt

SEQ ID NO: 7432 - DNA, 38 bp, Artificial Sequence
  Description of Artificial Sequence: Synthetic primer
  Description of Combined DNA/RNA Molecule: Synthetic primer
acgacgacgacgaacagcattgccaccagcccagtgga

SEQ ID NO: 7433 - DNA, 53 bp, Artificial Sequence
  Description of Artificial Sequence: Synthetic primer
  Description of Combined DNA/RNA Molecule: Synthetic primer
acgacgacgacttgacgaacataatgctccagtactgcacttggtggaggcta

SEQ ID NO: 7434 - DNA, 51 bp, Artificial Sequence
  Description of Artificial Sequence: Synthetic oligonucleotide
  Description of Combined DNA/RNA Molecule: Synthetic oligonucleotide
tggcgtaaggacactctgaaaccctccttcatcctcagccctttcaacaat

SEQ ID NO: 7435 - DNA, 46 bp, Artificial Sequence
  Description of Artificial Sequence: Synthetic oligonucleotide
acagcacaaggaactcctgtcctgcccgtttcctctgtgcggacca

SEQ ID NO: 7436 - DNA, 31 bp, Artificial Sequence
  Description of Artificial Sequence: Synthetic probe
ttcctttcaacagcacaaggaactcctgtcc

SEQ ID NO: 7437 - DNA, 22 bp, Artificial Sequence
  Description of Artificial Sequence: Synthetic primer
tggcgtaaggacactctgaaac

SEQ ID NO: 7438 - DNA, 19 bp, Artificial Sequence
  Description of Artificial Sequence: Synthetic primer
tggtccgcacagaggaaac

SEQ ID NO: 7439 - DNA, 47 bp, Artificial Sequence
  Description of Artificial Sequence: Synthetic primer
  Description of Combined DNA/RNA Molecule: Synthetic primer
tggtccgcacagaggaaaccagtactgcacttggtggaggttgaaga

SEQ ID NO: 7440 - DNA, 40 bp, Artificial Sequence
  Description of Artificial Sequence: Synthetic primer
  Description of Combined DNA/RNA Molecule: Synthetic primer
acgacgacgacgaacctcaaacacctgctgcaccactcaa

SEQ ID NO: 7441 - DNA, 41 bp, Artificial Sequence
  Description of Artificial Sequence: Synthetic primer
  Description of Combined DNA/RNA Molecule: Synthetic primer
acgacgacgacgaaaacacctgctgcaccactcagagcctc

SEQ ID NO: 7442 - DNA, 49 bp, Artificial Sequence
  Description of Artificial Sequence: Synthetic primer
  Description of Combined DNA/RNA Molecule: Synthetic primer
acgacgacgacttgacgaacataattgtggcacccctgaggtgccatga

SEQ ID NO: 7443 - DNA, 45 bp, Artificial Sequence
  Description of Artificial Sequence: Synthetic oligonucleotide
  Description of Combined DNA/RNA Molecule: Synthetic oligonucleotide
tcacgcacgtagggtctaaaccccaccccaacctccttcacagtc

SEQ ID NO: 7444 - DNA, 46 bp, Artificial Sequence
  Description of Artificial Sequence: Synthetic oligonucleotide
cagctccacaccagcaagactgcaccgttgtccggctgtggttaca

SEQ ID NO: 7445 - DNA, 27 bp, Artificial Sequence
  Description of Artificial Sequence: Synthetic probe
tttccttcacagctccacaccagcaag

SEQ ID NO: 7446 - DNA, 21 bp, Artificial Sequence
  Description of Artificial Sequence: Synthetic primer
tcacgcacgtagggtctaaac

SEQ ID NO: 7447 - DNA, 20 bp, Artificial Sequence
  Description of Artificial Sequence: Synthetic primer
tgtaaccacagccggacaac

SEQ ID NO: 7448 - DNA, 44 bp, Artificial Sequence
  Description of Artificial Sequence: Synthetic primer
  Description of Combined DNA/RNA Molecule: Synthetic primer
tgtaaccacagccggacaacccctgaggtgccatgggatgcagc

SEQ ID NO: 7449 - DNA, 47 bp, Artificial Sequence
  Description of Artificial Sequence: Synthetic primer
  Description of Combined DNA/RNA Molecule: Synthetic primer
acgacgacgacgaagtgtttgataccaggaagcctcacttcagaagc

SEQ ID NO: 7450 - DNA, 47 bp, Artificial Sequence
  Description of Artificial Sequence: Synthetic primer
  Description of Combined DNA/RNA Molecule: Synthetic primer
acgacgacgacgaagataccaggaagcctcacttcagaagtcacaag

SEQ ID NO: 7451 - DNA, 52 bp, Artificial Sequence
  Description of Artificial Sequence: Synthetic primer
  Description of Combined DNA/RNA Molecule: Synthetic primer
acgacgacgacttgacgaacataatcctcagcactttgcctggtggtutcta

SEQ ID NO: 7452 - DNA, 54 bp, Artificial Sequence
  Description of Artificial Sequence: Synthetic oligonucleotide
  Description of Combined DNA/RNA Molecule: Synthetic oligonucleotide
tcttacgcccagggaatgtaacgagctggttacactcacctagaactcagcaaa

SEQ ID NO: 7453 - DNA, 46 bp, Artificial Sequence
  Description of Artificial Sequence: Synthetic oligonucleotide
gcagggaaggccaccattctccccaggttgtccggctgtggttaca

SEQ ID NO: 7454 - DNA, 28 bp, Artificial Sequence
  Description of Artificial Sequence: Synthetic probe
ccgaactcagcagggaaggccaccattc

SEQ ID NO: 7455 - DNA, 22 bp, Artificial Sequence
  Description of Artificial Sequence: Synthetic primer
tcttacgcccagggaatgtaac

SEQ ID NO: 7456 - DNA, 20 bp, Artificial Sequence
  Description of Artificial Sequence: Synthetic primer
tgtaaccacagccggacaac

SEQ ID NO: 7457 - DNA, 49 bp, Artificial Sequence
  Description of Artificial Sequence: Synthetic primer
  Description of Combined DNA/RNA Molecule: Synthetic primer
tgtaaccacagccggacaactcagcactttgcctggtggtttttgggag

SEQ ID NO: 7458 - DNA, 45 bp, Artificial Sequence; identical to SEQ ID NO: 1799
  Description of Artificial Sequence: Synthetic primer
  Description of Combined DNA/RNA Molecule: Synthetic primer

SEQ ID NO: 7459 - DNA, 48 bp, Artificial Sequence; identical to SEQ ID NO: 1800
  Description of Artificial Sequence: Synthetic primer
  Description of Combined DNA/RNA Molecule: Synthetic primer

SEQ ID NO: 7460 - DNA, 55 bp, Artificial Sequence; identical to SEQ ID NO: 1801
  Description of Artificial Sequence: Synthetic primer
  Description of Combined DNA/RNA Molecule: Synthetic primer

SEQ ID NO: 7461 - DNA, 47 bp, Artificial Sequence; identical to SEQ ID NO: 1802
  Description of Artificial Sequence: Synthetic oligonucleotide
  Description of Combined DNA/RNA Molecule: Synthetic oligonucleotide

SEQ ID NO: 7462 - DNA, 49 bp, Artificial Sequence; identical to SEQ ID NO: 1803
  Description of Artificial Sequence: Synthetic oligonucleotide

SEQ ID NO: 7463 - DNA, 24 bp, Artificial Sequence
  Description of Artificial Sequence: Synthetic probe
ttggagacagccaggagaggcagc

SEQ ID NO: 7464 - DNA, 21 bp, Artificial Sequence
  Description of Artificial Sequence: Synthetic primer
taatctccagacctccgaacc

SEQ ID NO: 7465 - DNA, 22 bp, Artificial Sequence
  Description of Artificial Sequence: Synthetic primer
tgtcccgttcaatccttacacc

SEQ ID NO: 7466 - DNA, 48 bp, Artificial Sequence; identical to SEQ ID NO: 1807
  Description of Artificial Sequence: Synthetic primer
  Description of Combined DNA/RNA Molecule: Synthetic primer

SEQ ID NO: 7467 - DNA, 40 bp, Artificial Sequence; identical to SEQ ID NO: 5234
  Description of Artificial Sequence: Synthetic primer
  Description of Combined DNA/RNA Molecule: Synthetic primer

SEQ ID NO: 7468 - DNA, 39 bp, Artificial Sequence; identical to SEQ ID NO: 5235
  Description of Artificial Sequence: Synthetic primer
  Description of Combined DNA/RNA Molecule: Synthetic primer

SEQ ID NO: 7469 - DNA, 53 bp, Artificial Sequence; identical to SEQ ID NO: 5236
  Description of Artificial Sequence: Synthetic primer
  Description of Combined DNA/RNA Molecule: Synthetic primer

SEQ ID NO: 7470 - DNA, 46 bp, Artificial Sequence; identical to SEQ ID NO: 5237
  Description of Artificial Sequence: Synthetic oligonucleotide
  Description of Combined DNA/RNA Molecule: Synthetic oligonucleotide

SEQ ID NO: 7471 - DNA, 46 bp, Artificial Sequence; identical to SEQ ID NO: 5238
  Description of Artificial Sequence: Synthetic oligonucleotide

SEQ ID NO: 7472 - DNA, 28 bp, Artificial Sequence
  Description of Artificial Sequence: Synthetic probe
ttggcatcagggacccacactgagagtc

SEQ ID NO: 7473 - DNA, 19 bp, Artificial Sequence
  Description of Artificial Sequence: Synthetic primer
ttgttcgcccgttggtcac

SEQ ID NO: 7474 - DNA, 19 bp, Artificial Sequence
  Description of Artificial Sequence: Synthetic primer
tgcaaccttagcgctccac

SEQ ID NO: 7475 - DNA, 47 bp, Artificial Sequence; identical to SEQ ID NO: 5242
  Description of Artificial Sequence: Synthetic primer
  Description of Combined DNA/RNA Molecule: Synthetic primer

SEQ ID NO: 7476 - DNA, 39 bp, Artificial Sequence; identical to SEQ ID NO: 5270
  Description of Artificial Sequence: Synthetic primer
  Description of Combined DNA/RNA Molecule: Synthetic primer

SEQ ID NO: 7477 - DNA, 37 bp, Artificial Sequence; identical to SEQ ID NO: 5271
  Description of Artificial Sequence: Synthetic primer
  Description of Combined DNA/RNA Molecule: Synthetic primer

SEQ ID NO: 7478 - DNA, 55 bp, Artificial Sequence; identical to SEQ ID NO: 5272
  Description of Artificial Sequence: Synthetic primer
  Description of Combined DNA/RNA Molecule: Synthetic primer

SEQ ID NO: 7479 - DNA, 49 bp, Artificial Sequence; identical to SEQ ID NO: 5273
  Description of Artificial Sequence: Synthetic oligonucleotide
  Description of Combined DNA/RNA Molecule: Synthetic oligonucleotide

SEQ ID NO: 7480 - DNA, 48 bp, Artificial Sequence; identical to SEQ ID NO: 5274
  Description of Artificial Sequence: Synthetic oligonucleotide

SEQ ID NO: 7481 - DNA, 26 bp, Artificial Sequence
  Description of Artificial Sequence: Synthetic probe
tttggcgcacacaacttccaggacag

SEQ ID NO: 7482 - DNA, 20 bp, Artificial Sequence
  Description of Artificial Sequence: Synthetic primer
ttcttcacagtaccgccaca

SEQ ID NO: 7483 - DNA, 19 bp, Artificial Sequence
  Description of Artificial Sequence: Synthetic primer
tgcaccaccagacaacaca

SEQ ID NO: 7484 - DNA, 45 bp, Artificial Sequence; identical to SEQ ID NO: 5278
  Description of Artificial Sequence: Synthetic primer
  Description of Combined DNA/RNA Molecule: Synthetic primer

SEQ ID NO: 7485 - DNA, 39 bp, Artificial Sequence; identical to SEQ ID NO: 5315
  Description of Artificial Sequence: Synthetic primer
  Description of Combined DNA/RNA Molecule: Synthetic primer

SEQ ID NO: 7486 - DNA, 39 bp, Artificial Sequence; identical to SEQ ID NO: 5316
  Description of Artificial Sequence: Synthetic primer
  Description of Combined DNA/RNA Molecule: Synthetic primer

SEQ ID NO: 7487 - DNA, 50 bp, Artificial Sequence; identical to SEQ ID NO: 5317
  Description of Artificial Sequence: Synthetic primer
  Description of Combined DNA/RNA Molecule: Synthetic primer

SEQ ID NO: 7488 - DNA, 51 bp, Artificial Sequence; identical to SEQ ID NO: 5318
  Description of Artificial Sequence: Synthetic oligonucleotide
  Description of Combined DNA/RNA Molecule: Synthetic oligonucleotide

SEQ ID NO: 7489 - DNA, 51 bp, Artificial Sequence; identical to SEQ ID NO: 5319
  Description of Artificial Sequence: Synthetic oligonucleotide

SEQ ID NO: 7490 - DNA, 29 bp, Artificial Sequence
  Description of Artificial Sequence: Synthetic probe
ttcccagcaccatgtgcctcaaccataac

SEQ ID NO: 7491 - DNA, 19 bp, Artificial Sequence
  Description of Artificial Sequence: Synthetic primer
ttgcacgttgtcctgcacc

SEQ ID NO: 7492 - DNA, 20 bp, Artificial Sequence
  Description of Artificial Sequence: Synthetic primer
tgccgtcatgggaaactacc

SEQ ID NO: 7493 - DNA, 44 bp, Artificial Sequence; identical to SEQ ID NO: 5323
  Description of Artificial Sequence: Synthetic primer
  Description of Combined DNA/RNA Molecule: Synthetic primer

SEQ ID NO: 7494 - DNA, 38 bp, Artificial Sequence; identical to SEQ ID NO: 5360
  Description of Artificial Sequence: Synthetic primer
  Description of Combined DNA/RNA Molecule: Synthetic primer

SEQ ID NO: 7495 - DNA, 40 bp, Artificial Sequence; identical to SEQ ID NO: 5361
  Description of Artificial Sequence: Synthetic primer
  Description of Combined DNA/RNA Molecule: Synthetic primer

SEQ ID NO: 7496 - DNA, 52 bp, Artificial Sequence; identical to SEQ ID NO: 5362
  Description of Artificial Sequence: Synthetic primer
  Description of Combined DNA/RNA Molecule: Synthetic primer

SEQ ID NO: 7497 - DNA, 48 bp, Artificial Sequence; identical to SEQ ID NO: 5363
  Description of Artificial Sequence: Synthetic oligonucleotide
  Description of Combined DNA/RNA Molecule: Synthetic oligonucleotide

SEQ ID NO: 7498 - DNA, 44 bp, Artificial Sequence; identical to SEQ ID NO: 5364
  Description of Artificial Sequence: Synthetic oligonucleotide

SEQ ID NO: 7499 - DNA, 26 bp, Artificial Sequence
  Description of Artificial Sequence: Synthetic probe
ttgcactcagacacacaccacccagg

SEQ ID NO: 7500 - DNA, 21 bp, Artificial Sequence
  Description of Artificial Sequence: Synthetic primer
ttgcatttcgttagcgacaca

SEQ ID NO: 7501 - DNA, 20 bp, Artificial Sequence
  Description of Artificial Sequence: Synthetic primer
tgcgggtagatcgactcaca

SEQ ID NO: 7502 - DNA, 47 bp, Artificial Sequence; identical to SEQ ID NO: 5368
  Description of Artificial Sequence: Synthetic primer
  Description of Combined DNA/RNA Molecule: Synthetic primer

SEQ ID NO: 7503 - DNA, 39 bp, Artificial Sequence; identical to SEQ ID NO: 5369
  Description of Artificial Sequence: Synthetic primer
  Description of Combined DNA/RNA Molecule: Synthetic primer

SEQ ID NO: 7504 - DNA, 41 bp, Artificial Sequence; identical to SEQ ID NO: 5370
  Description of Artificial Sequence: Synthetic primer
  Description of Combined DNA/RNA Molecule: Synthetic primer

SEQ ID NO: 7505 - DNA, 52 bp, Artificial Sequence; identical to SEQ ID NO: 5371
  Description of Artificial Sequence: Synthetic primer
  Description of Combined DNA/RNA Molecule: Synthetic primer

SEQ ID NO: 7506 - DNA, 48 bp, Artificial Sequence; identical to SEQ ID NO: 5372
  Description of Artificial Sequence: Synthetic oligonucleotide
  Description of Combined DNA/RNA Molecule: Synthetic oligonucleotide

SEQ ID NO: 7507 - DNA, 50 bp, Artificial Sequence; identical to SEQ ID NO: 5373
  Description of Artificial Sequence: Synthetic oligonucleotide

SEQ ID NO: 7508 - DNA, 30 bp, Artificial Sequence; identical to SEQ ID NO: 5374
  Description of Artificial Sequence: Synthetic probe

SEQ ID NO: 7509 - DNA, 21 bp, Artificial Sequence
  Description of Artificial Sequence: Synthetic primer
taccactcatcttctgcgaca

SEQ ID NO: 7510 - DNA, 20 bp, Artificial Sequence
  Description of Artificial Sequence: Synthetic primer
tgcgggtagatcgactcaca

SEQ ID NO: 7511 - DNA, 46 bp, Artificial Sequence; identical to SEQ ID NO: 5377
  Description of Artificial Sequence: Synthetic primer
  Description of Combined DNA/RNA Molecule: Synthetic primer

SEQ ID NO: 7512 - DNA, 40 bp, Artificial Sequence; identical to SEQ ID NO: 5396
  Description of Artificial Sequence: Synthetic primer
  Description of Combined DNA/RNA Molecule: Synthetic primer

SEQ ID NO: 7513 - DNA, 40 bp, Artificial Sequence; identical to SEQ ID NO: 5397
  Description of Artificial Sequence: Synthetic primer
  Description of Combined DNA/RNA Molecule: Synthetic primer

SEQ ID NO: 7514 - DNA, 50 bp, Artificial Sequence; identical to SEQ ID NO: 5398
  Description of Artificial Sequence: Synthetic primer
  Description of Combined DNA/RNA Molecule: Synthetic primer

SEQ ID NO: 7515 - DNA, 46 bp, Artificial Sequence; identical to SEQ ID NO: 5399
  Description of Artificial Sequence: Synthetic oligonucleotide
  Description of Combined DNA/RNA Molecule: Synthetic oligonucleotide

SEQ ID NO: 7516 - DNA, 43 bp, Artificial Sequence; identical to SEQ ID NO: 5400
  Description of Artificial Sequence: Synthetic oligonucleotide

SEQ ID NO: 7517 - DNA, 20 bp, Artificial Sequence
  Description of Artificial Sequence: Synthetic probe
ttcccaccaggagccagcac

SEQ ID NO: 7518 - DNA, 19 bp, Artificial Sequence
  Description of Artificial Sequence: Synthetic primer
ttgcaacaggctaccgacc

SEQ ID NO: 7519 - DNA, 21 bp, Artificial Sequence
  Description of Artificial Sequence: Synthetic primer
tgcgtgacttccttacctacc

SEQ ID NO: 7520 - DNA, 46 bp, Artificial Sequence; identical to SEQ ID NO: 5404
  Description of Artificial Sequence: Synthetic primer
  Description of Combined DNA/RNA Molecule: Synthetic primer

SEQ ID NO: 7521 - DNA, 38 bp, Artificial Sequence; identical to SEQ ID NO: 5424
  Description of Artificial Sequence: Synthetic primer
  Description of Combined DNA/RNA Molecule: Synthetic primer

SEQ ID NO: 7522 - DNA, 38 bp, Artificial Sequence; identical to SEQ ID NO: 5425
  Description of Artificial Sequence: Synthetic primer
  Description of Combined DNA/RNA Molecule: Synthetic primer

SEQ ID NO: 7523 - DNA, 55 bp, Artificial Sequence; identical to SEQ ID NO: 5426
  Description of Artificial Sequence: Synthetic primer
  Description of Combined DNA/RNA Molecule: Synthetic primer

SEQ ID NO: 7524 - DNA, 44 bp, Artificial Sequence; identical to SEQ ID NO: 5427
  Description of Artificial Sequence: Synthetic oligonucleotide
  Description of Combined DNA/RNA Molecule: Synthetic oligonucleotide

SEQ ID NO: 7525 - DNA, 44 bp, Artificial Sequence; identical to SEQ ID NO: 5428
  Description of Artificial Sequence: Synthetic oligonucleotide

SEQ ID NO: 7526 - DNA, 25 bp, Artificial Sequence
  Description of Artificial Sequence: Synthetic probe
aaggctacagtgggcagcatgtctg

SEQ ID NO: 7527 - DNA, 19 bp, Artificial Sequence
  Description of Artificial Sequence: Synthetic primer
tttccgccgctacaaccaa

SEQ ID NO: 7528 - DNA, 19 bp, Artificial Sequence
  Description of Artificial Sequence: Synthetic primer
tgctcagacgctgcttcaa

SEQ ID NO: 7529 - DNA, 45 bp, Artificial Sequence; identical to SEQ ID NO: 5432
  Description of Artificial Sequence: Synthetic primer
  Description of Combined DNA/RNA Molecule: Synthetic primer

SEQ ID NO: 7530 - DNA, 41 bp, Artificial Sequence; identical to SEQ ID NO: 5433
  Description of Artificial Sequence: Synthetic primer
  Description of Combined DNA/RNA Molecule: Synthetic primer

SEQ ID NO: 7531 - DNA, 42 bp, Artificial Sequence; identical to SEQ ID NO: 5434
  Description of Artificial Sequence: Synthetic primer
  Description of Combined DNA/RNA Molecule: Synthetic primer

SEQ ID NO: 7532 - DNA, 49 bp, Artificial Sequence; identical to SEQ ID NO: 5435
  Description of Artificial Sequence: Synthetic primer
  Description of Combined DNA/RNA Molecule: Synthetic primer

SEQ ID NO: 7533 - DNA, 43 bp, Artificial Sequence; identical to SEQ ID NO: 5436
  Description of Artificial Sequence: Synthetic oligonucleotide
  Description of Combined DNA/RNA Molecule: Synthetic oligonucleotide

SEQ ID NO: 7534 - DNA, 45 bp, Artificial Sequence; identical to SEQ ID NO: 5437
  Description of Artificial Sequence: Synthetic oligonucleotide

SEQ ID NO: 7535 - DNA, 22 bp, Artificial Sequence
  Description of Artificial Sequence: Synthetic probe
aagtggacaggcccagggcaca

SEQ ID NO: 7536 - DNA, 20 bp, Artificial Sequence
  Description of Artificial Sequence: Synthetic primer
tcgtagactcgctatcgcca

SEQ ID NO: 7537 - DNA, 19 bp, Artificial Sequence
  Description of Artificial Sequence: Synthetic primer
tgctcatccctgctcacca

SEQ ID NO: 7538 - DNA, 47 bp, Artificial Sequence; identical to SEQ ID NO: 5441
  Description of Artificial Sequence: Synthetic primer
  Description of Combined DNA/RNA Molecule: Synthetic primer

SEQ ID NO: 7539 - DNA, 42 bp, Artificial Sequence; identical to SEQ ID NO: 5451
  Description of Artificial Sequence: Synthetic primer
  Description of Combined DNA/RNA Molecule: Synthetic primer

SEQ ID NO: 7540 - DNA, 41 bp, Artificial Sequence; identical to SEQ ID NO: 5452
  Description of Artificial Sequence: Synthetic primer
  Description of Combined DNA/RNA Molecule: Synthetic primer

SEQ ID NO: 7541 - DNA, 52 bp, Artificial Sequence; identical to SEQ ID NO: 5453
  Description of Artificial Sequence: Synthetic primer
  Description of Combined DNA/RNA Molecule: Synthetic primer

SEQ ID NO: 7542 - DNA, 50 bp, Artificial Sequence; identical to SEQ ID NO: 5454
  Description of Artificial Sequence: Synthetic oligonucleotide
  Description of Combined DNA/RNA Molecule: Synthetic oligonucleotide

SEQ ID NO: 7543 - DNA, 48 bp, Artificial Sequence; identical to SEQ ID NO: 5455
  Description of Artificial Sequence: Synthetic oligonucleotide

SEQ ID NO: 7544 - DNA, 27 bp, Artificial Sequence
  Description of Artificial Sequence: Synthetic probe
tttcctccatcctcagcccttccaaca

SEQ ID NO: 7545 - DNA, 19 bp, Artificial Sequence
  Description of Artificial Sequence: Synthetic primer
tccggcctttgacgatacc

SEQ ID NO: 7546 - DNA, 22 bp, Artificial Sequence
  Description of Artificial Sequence: Synthetic primer
tgctccgttcgagtgaattacc

SEQ ID NO: 7547 - DNA, 49 bp, Artificial Sequence; identical to SEQ ID NO: 5459
  Description of Artificial Sequence: Synthetic primer
  Description of Combined DNA/RNA Molecule: Synthetic primer

SEQ ID NO: 7548 - DNA, 38 bp, Artificial Sequence; identical to SEQ ID NO: 5181
  Description of Artificial Sequence: Synthetic primer
  Description of Combined DNA/RNA Molecule: Synthetic primer

SEQ ID NO: 7549 - DNA, 42 bp, Artificial Sequence; identical to SEQ ID NO: 5182
  Description of Artificial Sequence: Synthetic primer
  Description of Combined DNA/RNA Molecule: Synthetic primer

SEQ ID NO: 7550 - DNA, 53 bp, Artificial Sequence; identical to SEQ ID NO: 5183
  Description of Artificial Sequence: Synthetic primer
  Description of Combined DNA/RNA Molecule: Synthetic primer

SEQ ID NO: 7551 - DNA, 45 bp, Artificial Sequence; identical to SEQ ID NO: 5184
  Description of Artificial Sequence: Synthetic oligonucleotide
  Description of Combined DNA/RNA Molecule: Synthetic oligonucleotide

SEQ ID NO: 7552 - DNA, 49 bp, Artificial Sequence; identical to SEQ ID NO: 5185
  Description of Artificial Sequence: Synthetic oligonucleotide

SEQ ID NO: 7553 - DNA, 28 bp, Artificial Sequence
  Description of Artificial Sequence: Synthetic probe
ttcagcccagtcccattatcccaagcac

SEQ ID NO: 7554 - DNA, 20 bp, Artificial Sequence
  Description of Artificial Sequence: Synthetic primer
tttgcctcttgtaggtgcca

SEQ ID NO: 7555 - DNA, 19 bp, Artificial Sequence
  Description of Artificial Sequence: Synthetic primer
tgaatatccgcgttgccca

SEQ ID NO: 7556 - DNA, 49 bp, Artificial Sequence; identical to SEQ ID NO: 5189
  Description of Artificial Sequence: Synthetic primer
  Description of Combined DNA/RNA Molecule: Synthetic primer

SEQ ID NO: 7557 - DNA, 45 bp, Artificial Sequence; identical to SEQ ID NO: 5496
  Description of Artificial Sequence: Synthetic primer
  Description of Combined DNA/RNA Molecule: Synthetic primer

SEQ ID NO: 7558 - DNA, 46 bp, Artificial Sequence; identical to SEQ ID NO: 5497
  Description of Artificial Sequence: Synthetic primer
  Description of Combined DNA/RNA Molecule: Synthetic primer

SEQ ID NO: 7559 - DNA, 55 bp, Artificial Sequence; identical to SEQ ID NO: 5498
  Description of Artificial Sequence: Synthetic primer
  Description of Combined DNA/RNA Molecule: Synthetic primer

SEQ ID NO: 7560 - DNA, 54 bp, Artificial Sequence; identical to SEQ ID NO: 5499
  Description of Artificial Sequence: Synthetic oligonucleotide
  Description of Combined DNA/RNA Molecule: Synthetic oligonucleotide

SEQ ID NO: 7561 - DNA, 53 bp, Artificial Sequence; identical to SEQ ID NO: 5500
  Description of Artificial Sequence: Synthetic oligonucleotide

SEQ ID NO: 7562 - DNA, 29 bp, Artificial Sequence
  Description of Artificial Sequence: Synthetic probe
cctgggacaatggagagagtctcactctg

SEQ ID NO: 7563 - DNA, 22 bp, Artificial Sequence
  Description of Artificial Sequence: Synthetic primer
tcgatggtcaatgagcttcaca

SEQ ID NO: 7564 - DNA, 22 bp, Artificial Sequence
  Description of Artificial Sequence: Synthetic primer
tggagagggagatcacgtaaca

SEQ ID NO: 7565 - DNA, 51 bp, Artificial Sequence; identical to SEQ ID NO: 5504
  Description of Artificial Sequence: Synthetic primer
  Description of Combined DNA/RNA Molecule: Synthetic primer

SEQ ID NO: 7566 - DNA, 36 bp, Artificial Sequence; identical to SEQ ID NO: 5531
  Description of Artificial Sequence: Synthetic primer
  Description of Combined DNA/RNA Molecule: Synthetic primer

SEQ ID NO: 7567 - DNA, 38 bp, Artificial Sequence; identical to SEQ ID NO: 5532
  Description of Artificial Sequence: Synthetic primer
  Description of Combined DNA/RNA Molecule: Synthetic primer

SEQ ID NO: 7568 - DNA, 54 bp, Artificial Sequence; identical to SEQ ID NO: 5533
  Description of Artificial Sequence: Synthetic primer
  Description of Combined DNA/RNA Molecule: Synthetic primer

SEQ ID NO: 7569 - DNA, 50 bp, Artificial Sequence; identical to SEQ ID NO: 5534
  Description of Artificial Sequence: Synthetic oligonucleotide
  Description of Combined DNA/RNA Molecule: Synthetic oligonucleotide

SEQ ID NO: 7570 - DNA, 42 bp, Artificial Sequence; identical to SEQ ID NO: 5535
  Description of Artificial Sequence: Synthetic oligonucleotide

SEQ ID NO: 7571 - DNA, 24 bp, Artificial Sequence
  Description of Artificial Sequence: Synthetic probe
aaagcctcaagccaccctccacac

SEQ ID NO: 7572 - DNA, 22 bp, Artificial Sequence
  Description of Artificial Sequence: Synthetic primer
tgatgctggcaaaccctagaac

SEQ ID NO: 7573 - DNA, 20 bp, Artificial Sequence
  Description of Artificial Sequence: Synthetic primer
tggcctaacggtgatggaac

SEQ ID NO: 7574 - DNA, 52 bp, Artificial Sequence; identical to SEQ ID NO: 5539
  Description of Artificial Sequence: Synthetic primer
  Description of Combined DNA/RNA Molecule: Synthetic primer

SEQ ID NO: 7575 - DNA, 41 bp, Artificial Sequence; identical to SEQ ID NO: 5584
  Description of Artificial Sequence: Synthetic primer
  Description of Combined DNA/RNA Molecule: Synthetic primer

SEQ ID NO: 7576 - DNA, 41 bp, Artificial Sequence; identical to SEQ ID NO: 5585
  Description of Artificial Sequence: Synthetic primer
  Description of Combined DNA/RNA Molecule: Synthetic primer

SEQ ID NO: 7577 - DNA, 61 bp, Artificial Sequence; identical to SEQ ID NO: 5586
  Description of Artificial Sequence: Synthetic primer
  Description of Combined DNA/RNA Molecule: Synthetic primer

SEQ ID NO: 7578 - DNA, 46 bp, Artificial Sequence; identical to SEQ ID NO: 5587
  Description of Artificial Sequence: Synthetic oligonucleotide
  Description of Combined DNA/RNA Molecule: Synthetic oligonucleotide

SEQ ID NO: 7579 - DNA, 50 bp, Artificial Sequence; identical to SEQ ID NO: 5588
  Description of Artificial Sequence: Synthetic oligonucleotide

SEQ ID NO: 7580 - DNA, 29 bp, Artificial Sequence
  Description of Artificial Sequence: Synthetic probe
ttccctacactggactggttcaagcttcc

SEQ ID NO: 7581 - DNA, 22 bp, Artificial Sequence
  Description of Artificial Sequence: Synthetic primer
tccaaacgattaggagcgtcaa

SEQ ID NO: 7582 - DNA, 21 bp, Artificial Sequence
  Description of Artificial Sequence: Synthetic primer
tgggcgtatacctctgtccaa

SEQ ID NO: 7583 - DNA, 53 bp, Artificial Sequence; identical to SEQ ID NO: 5592
  Description of Artificial Sequence: Synthetic primer
  Description of Combined DNA/RNA Molecule: Synthetic primer

SEQ ID NO: 7584 - DNA, 41 bp, Artificial Sequence; identical to SEQ ID NO: 5593
  Description of Artificial Sequence: Synthetic primer
  Description of Combined DNA/RNA Molecule: Synthetic primer

SEQ ID NO: 7585 - DNA, 38 bp, Artificial Sequence; identical to SEQ ID NO: 5594
  Description of Artificial Sequence: Synthetic primer
  Description of Combined DNA/RNA Molecule: Synthetic primer

SEQ ID NO: 7586 - DNA, 53 bp, Artificial Sequence; identical to SEQ ID NO: 5595
  Description of Artificial Sequence: Synthetic primer
  Description of Combined DNA/RNA Molecule: Synthetic primer

SEQ ID NO: 7587 - DNA, 46 bp, Artificial Sequence; identical to SEQ ID NO: 5596
  Description of Artificial Sequence: Synthetic oligonucleotide
  Description of Combined DNA/RNA Molecule: Synthetic oligonucleotide

SEQ ID NO: 7588 - DNA, 44 bp, Artificial Sequence; identical to SEQ ID NO: 5597
  Description of Artificial Sequence: Synthetic oligonucleotide

SEQ ID NO: 7589 - DNA, 23 bp, Artificial Sequence
  Description of Artificial Sequence: Synthetic probe
ttctccgcaccccagctccagtc

SEQ ID NO: 7590 - DNA, 22 bp, Artificial Sequence
  Description of Artificial Sequence: Synthetic primer
tccaaacgattaggagcgtcaa

SEQ ID NO: 7591 - DNA, 21 bp, Artificial Sequence
  Description of Artificial Sequence: Synthetic primer
tgggcgtatacctctgtccaa

SEQ ID NO: 7592 - DNA, 48 bp, Artificial Sequence; identical to SEQ ID NO: 5601
  Description of Artificial Sequence: Synthetic primer
  Description of Combined DNA/RNA Molecule: Synthetic primer

SEQ ID NO: 7593 - DNA, 46 bp, Artificial Sequence; identical to SEQ ID NO: 5611
  Description of Artificial Sequence: Synthetic primer
  Description of Combined DNA/RNA Molecule: Synthetic primer

SEQ ID NO: 7594 - DNA, 47 bp, Artificial Sequence; identical to SEQ ID NO: 5612
  Description of Artificial Sequence: Synthetic primer
  Description of Combined DNA/RNA Molecule: Synthetic primer

SEQ ID NO: 7595 - DNA, 49 bp, Artificial Sequence; identical to SEQ ID NO: 5613
  Description of Artificial Sequence: Synthetic primer
  Description of Combined DNA/RNA Molecule: Synthetic primer

SEQ ID NO: 7596 - DNA, 47 bp, Artificial Sequence; identical to SEQ ID NO: 5614
  Description of Artificial Sequence: Synthetic oligonucleotide
  Description of Combined DNA/RNA Molecule: Synthetic oligonucleotide

SEQ ID NO: 7597 - DNA, 46 bp, Artificial Sequence; identical to SEQ ID NO: 5615
  Description of Artificial Sequence: Synthetic oligonucleotide

SEQ ID NO: 7598 - DNA, 25 bp, Artificial Sequence
  Description of Artificial Sequence: Synthetic probe
aatatcgcaggtccacatggccacc

SEQ ID NO: 7599 - DNA, 19 bp, Artificial Sequence
  Description of Artificial Sequence: Synthetic primer
ttcgtgcgtcgtgtagcaa

SEQ ID NO: 7600 - DNA, 20 bp, Artificial Sequence
  Description of Artificial Sequence: Synthetic primer
tgggtgcagaaaatgggcaa

SEQ ID NO: 7601 - DNA, 45 bp, Artificial Sequence; identical to SEQ ID NO: 5619
  Description of Artificial Sequence: Synthetic primer
  Description of Combined DNA/RNA Molecule: Synthetic primer

SEQ ID NO: 7602 - DNA, 47 bp, Artificial Sequence; identical to SEQ ID NO: 5620
  Description of Artificial Sequence: Synthetic primer
  Description of Combined DNA/RNA Molecule: Synthetic primer

SEQ ID NO: 7603 - DNA, 46 bp, Artificial Sequence; identical to SEQ ID NO: 5621
  Description of Artificial Sequence: Synthetic primer
  Description of Combined DNA/RNA Molecule: Synthetic primer

SEQ ID NO: 7604 - DNA, 51 bp, Artificial Sequence; identical to SEQ ID NO: 5622
  Description of Artificial Sequence: Synthetic primer
  Description of Combined DNA/RNA Molecule: Synthetic primer

SEQ ID NO: 7605 - DNA, 47 bp, Artificial Sequence; identical to SEQ ID NO: 5623
  Description of Artificial Sequence: Synthetic oligonucleotide
  Description of Combined DNA/RNA Molecule: Synthetic oligonucleotide

SEQ ID NO: 7606 - DNA, 42 bp, Artificial Sequence; identical to SEQ ID NO: 5624
  Description of Artificial Sequence: Synthetic oligonucleotide

SEQ ID NO: 7607 - DNA, 23 bp, Artificial Sequence
  Description of Artificial Sequence: Synthetic probe
aactccgcacctgccagccagag

SEQ ID NO: 7608 - DNA, 19 bp, Artificial Sequence
  Description of Artificial Sequence: Synthetic primer
ttcgtgcgtcgtgtagcaa

SEQ ID NO: 7609 - DNA, 20 bp, Artificial Sequence
  Description of Artificial Sequence: Synthetic primer
tgggtgcagaaaatgggcaa

SEQ ID NO: 7610 - DNA, 49 bp, Artificial Sequence; identical to SEQ ID NO: 5628
  Description of Artificial Sequence: Synthetic primer
  Description of Combined DNA/RNA Molecule: Synthetic primer

SEQ ID NO: 7611 - DNA, 41 bp, Artificial Sequence; identical to SEQ ID NO: 5297
  Description of Artificial Sequence: Synthetic primer
  Description of Combined DNA/RNA Molecule: Synthetic primer

SEQ ID NO: 7612 - DNA, 43 bp, Artificial Sequence; identical to SEQ ID NO: 5684
  Description of Artificial Sequence: Synthetic primer
  Description of Combined DNA/RNA Molecule: Synthetic primer

SEQ ID NO: 7613 - DNA, 52 bp, Artificial Sequence; identical to SEQ ID NO: 5685
  Description of Artificial Sequence: Synthetic primer
  Description of Combined DNA/RNA Molecule: Synthetic primer

SEQ ID NO: 7614 - DNA, 48 bp, Artificial Sequence; identical to SEQ ID NO: 5686
  Description of Artificial Sequence: Synthetic oligonucleotide
  Description of Combined DNA/RNA Molecule: Synthetic oligonucleotide

SEQ ID NO: 7615 - DNA, 46 bp, Artificial Sequence; identical to SEQ ID NO: 5687
  Description of Artificial Sequence: Synthetic oligonucleotide

SEQ ID NO: 7616 - DNA, 23 bp, Artificial Sequence
  Description of Artificial Sequence: Synthetic probe
ccgaggtcaggagtcagcccacc

SEQ ID NO: 7617 - DNA, 22 bp, Artificial Sequence
  Description of Artificial Sequence: Synthetic primer
tgccctatcgaaaaggacaaca

SEQ ID NO: 7618 - DNA, 21 bp, Artificial Sequence
  Description of Artificial Sequence: Synthetic primer
tgtcatagacagccgcaaaca

SEQ ID NO: 7619 - DNA, 49 bp, Artificial Sequence; identical to SEQ ID NO: 5691
  Description of Artificial Sequence: Synthetic primer
  Description of Combined DNA/RNA Molecule: Synthetic primer

SEQ ID NO: 7620 - DNA, 50 bp, Artificial Sequence; identical to SEQ ID NO: 5692
  Description of Artificial Sequence: Synthetic primer
  Description of Combined DNA/RNA Molecule: Synthetic primer

SEQ ID NO: 7621 - DNA, 44 bp, Artificial Sequence; identical to SEQ ID NO: 5693
  Description of Artificial Sequence: Synthetic primer
  Description of Combined DNA/RNA Molecule: Synthetic primer

SEQ ID NO: 7622 - DNA, 57 bp, Artificial Sequence; identical to SEQ ID NO: 5694
  Description of Artificial Sequence: Synthetic primer
  Description of Combined DNA/RNA Molecule: Synthetic primer

SEQ ID NO: 7623 - DNA, 49 bp, Artificial Sequence; identical to SEQ ID NO: 5695
  Description of Artificial Sequence: Synthetic oligonucleotide
  Description of Combined DNA/RNA Molecule: Synthetic oligonucleotide

SEQ ID NO: 7624 - DNA, 46 bp, Artificial Sequence; identical to SEQ ID NO: 5696
  Description of Artificial Sequence: Synthetic oligonucleotide

SEQ ID NO: 7625 - DNA, 24 bp, Artificial Sequence
  Description of Artificial Sequence: Synthetic probe
tttgtgacaaagccacagggcagc

SEQ ID NO: 7626 - DNA, 21 bp, Artificial Sequence
  Description of Artificial Sequence: Synthetic primer
taatctccagacctccgaacc

SEQ ID NO: 7627 - DNA, 22 bp, Artificial Sequence
  Description of Artificial Sequence: Synthetic primer
tgtcccgttcaatccttacacc

SEQ ID NO: 7628 - DNA, 52 bp, Artificial Sequence; identical to SEQ ID NO: 5700
  Description of Artificial Sequence: Synthetic primer
  Description of Combined DNA/RNA Molecule: Synthetic primer

SEQ ID NO: 7629 - DNA, 47 bp, Artificial Sequence; identical to SEQ ID NO: 632
  Description of Artificial Sequence: Synthetic primer
  Description of Combined DNA/RNA Molecule: Synthetic primer

SEQ ID NO: 7630 - DNA, 39 bp, Artificial Sequence; identical to SEQ ID NO: 633
  Description of Artificial Sequence: Synthetic primer
  Description of Combined DNA/RNA Molecule: Synthetic primer

SEQ ID NO: 7631 - DNA, 57 bp, Artificial Sequence; identical to SEQ ID NO: 5712
  Description of Artificial Sequence: Synthetic primer
  Description of Combined DNA/RNA Molecule: Synthetic primer

SEQ ID NO: 7632 - DNA, 48 bp, Artificial Sequence; identical to SEQ ID NO: 5713
  Description of Artificial Sequence: Synthetic oligonucleotide
  Description of Combined DNA/RNA Molecule: Synthetic oligonucleotide

SEQ ID NO: 7633 - DNA, 49 bp, Artificial Sequence; identical to SEQ ID NO: 5714
  Description of Artificial Sequence: Synthetic oligonucleotide

SEQ ID NO: 7634 - DNA, 24 bp, Artificial Sequence
  Description of Artificial Sequence: Synthetic probe
ttcctcgcaccttcatggccccaa

SEQ ID NO: 7635 - DNA, 19 bp, Artificial Sequence
  Description of Artificial Sequence: Synthetic primer
ttcgctgcccggttaaaca

SEQ ID NO: 7636 - DNA, 22 bp, Artificial Sequence
  Description of Artificial Sequence: Synthetic primer
tgtcgagctaggtccgataaca

SEQ ID NO: 7637 - DNA, 56 bp, Artificial Sequence; identical to SEQ ID NO: 5718
  Description of Artificial Sequence: Synthetic primer
  Description of Combined DNA/RNA Molecule: Synthetic primer

SEQ ID NO: 7638 - DNA, 44 bp, Artificial Sequence; identical to SEQ ID NO: 5737
  Description of Artificial Sequence: Synthetic primer
  Description of Combined DNA/RNA Molecule: Synthetic primer

SEQ ID NO: 7639 - DNA, 43 bp, Artificial Sequence; identical to SEQ ID NO: 5738
  Description of Artificial Sequence: Synthetic primer
  Description of Combined DNA/RNA Molecule: Synthetic primer

SEQ ID NO: 7640 - DNA, 52 bp, Artificial Sequence; identical to SEQ ID NO: 5739
  Description of Artificial Sequence: Synthetic primer
  Description of Combined DNA/RNA Molecule: Synthetic primer

SEQ ID NO: 7641 - DNA, 45 bp, Artificial Sequence; identical to SEQ ID NO: 5740
  Description of Artificial Sequence: Synthetic oligonucleotide
  Description of Combined DNA/RNA Molecule: Synthetic oligonucleotide

SEQ ID NO: 7642 - DNA, 49 bp, Artificial Sequence; identical to SEQ ID NO: 5741
  Description of Artificial Sequence: Synthetic oligonucleotide

SEQ ID NO: 7643 - DNA, 25 bp, Artificial Sequence
  Description of Artificial Sequence: Synthetic probe
ttgcactcagggtcctcagcactgc

SEQ ID NO: 7644 - DNA, 22 bp, Artificial Sequence
  Description of Artificial Sequence: Synthetic primer
tcctgctctgaaaacctacacc

SEQ ID NO: 7645 - DNA, 22 bp, Artificial Sequence
  Description of Artificial Sequence: Synthetic primer
tgtctaagccgcctatgtaacc

SEQ ID NO: 7646 - DNA, 50 bp, Artificial Sequence; identical to SEQ ID NO: 5745
  Description of Artificial Sequence: Synthetic primer
  Description of Combined DNA/RNA Molecule: Synthetic primer

SEQ ID NO: 7647 - DNA, 39 bp, Artificial Sequence; identical to SEQ ID NO: 5755
  Description of Artificial Sequence: Synthetic primer
  Description of Combined DNA/RNA Molecule: Synthetic primer

SEQ ID NO: 7648 - DNA, 38 bp, Artificial Sequence; identical to SEQ ID NO: 5756
  Description of Artificial Sequence: Synthetic primer

SEQ ID NO: 7649 - DNA, 55 bp, Artificial Sequence; identical to SEQ ID NO: 5757
  Description of Artificial Sequence: Synthetic primer
  Description of Combined DNA/RNA Molecule: Synthetic primer

SEQ ID NO: 7650 - DNA, 50 bp, Artificial Sequence; identical to SEQ ID NO: 5758
  Description of Artificial Sequence: Synthetic oligonucleotide
  Description of Combined DNA/RNA Molecule: Synthetic oligonucleotide

SEQ ID NO: 7651 - DNA, 42 bp, Artificial Sequence; identical to SEQ ID NO: 5759
  Description of Artificial Sequence: Synthetic oligonucleotide

SEQ ID NO: 7652 - DNA, 24 bp, Artificial Sequence
  Description of Artificial Sequence: Synthetic probe
ttgcattcaggagaggcagccagg

SEQ ID NO: 7653 - DNA, 22 bp, Artificial Sequence
  Description of Artificial Sequence: Synthetic primer
tggacacttcgcccttcttaac

SEQ ID NO: 7654 - DNA, 21 bp, Artificial Sequence
  Description of Artificial Sequence: Synthetic primer
tgtgatgcccagatcccaaac

SEQ ID NO: 7655 - DNA, 50 bp, Artificial Sequence; identical to SEQ ID NO: 5763
  Description of Artificial Sequence: Synthetic primer
  Description of Combined DNA/RNA Molecule: Synthetic primer

SEQ ID NO: 7656 - DNA, 41 bp, Artificial Sequence; identical to SEQ ID NO: 5791
  Description of Artificial Sequence: Synthetic primer
  Description of Combined DNA/RNA Molecule: Synthetic primer

SEQ ID NO: 7657 - DNA, 39 bp, Artificial Sequence; identical to SEQ ID NO: 5792
  Description of Artificial Sequence: Synthetic primer
  Description of Combined DNA/RNA Molecule: Synthetic primer

SEQ ID NO: 7658 - DNA, 53 bp, Artificial Sequence; identical to SEQ ID NO: 5793
  Description of Artificial Sequence: Synthetic primer
  Description of Combined DNA/RNA Molecule: Synthetic primer

SEQ ID NO: 7659 - DNA, 50 bp, Artificial Sequence; identical to SEQ ID NO: 5794
  Description of Artificial Sequence: Synthetic oligonucleotide
  Description of Combined DNA/RNA Molecule: Synthetic oligonucleotide

SEQ ID NO: 7660 - DNA, 44 bp, Artificial Sequence; identical to SEQ ID NO: 5795
  Description of Artificial Sequence: Synthetic oligonucleotide

SEQ ID NO: 7661 - DNA, 22 bp, Artificial Sequence
  Description of Artificial Sequence: Synthetic probe
cccttgccactgcaggccccac

SEQ ID NO: 7662 - DNA, 20 bp, Artificial Sequence
  Description of Artificial Sequence: Synthetic primer
tcctgaattggccacaccac

SEQ ID NO: 7663 - DNA, 21 bp, Artificial Sequence
  Description of Artificial Sequence: Synthetic primer
tgttagacgtcgctcagtcac

SEQ ID NO: 7664 - DNA, 47 bp, Artificial Sequence; identical to SEQ ID NO: 5799
  Description of Artificial Sequence: Synthetic primer
  Description of Combined DNA/RNA Molecule: Synthetic primer

SEQ ID NO: 7665 - DNA, 52 bp, Artificial Sequence; identical to SEQ ID NO: 5800
  Description of Artificial Sequence: Synthetic primer
  Description of Combined DNA/RNA Molecule: Synthetic primer

SEQ ID NO: 7666 - DNA, 53 bp, Artificial Sequence; identical to SEQ ID NO: 5801
  Description of Artificial Sequence: Synthetic primer
  Description of Combined DNA/RNA Molecule: Synthetic primer

SEQ ID NO: 7667 - DNA, 46 bp, Artificial Sequence; identical to SEQ ID NO: 5802
  Description of Artificial Sequence: Synthetic oligonucleotide
  Description of Combined DNA/RNA Molecule: Synthetic oligonucleotide

SEQ ID NO: 7668 - DNA, 48 bp, Artificial Sequence; identical to SEQ ID NO: 5803
  Description of Artificial Sequence: Synthetic oligonucleotide

SEQ ID NO: 7669 - DNA, 27 bp, Artificial Sequence
  Description of Artificial Sequence: Synthetic probe
aacccaacaggcatttctgcagggacc

SEQ ID NO: 7670 - DNA, 20 bp, Artificial Sequence
  Description of Artificial Sequence: Synthetic primer
ttcttgcggttctggaacac

SEQ ID NO: 7671 - DNA, 21 bp, Artificial Sequence
  Description of Artificial Sequence: Synthetic primer
ttagcaacaacggagcatcac

SEQ ID NO: 7672 - DNA, 60 bp, Artificial Sequence; identical to SEQ ID NO: 5807
  Description of Artificial Sequence: Synthetic primer
  Description of Combined DNA/RNA Molecule: Synthetic primer

SEQ ID NO: 7673 - DNA, 50 bp, Artificial Sequence; identical to SEQ ID NO: 5913
  Description of Artificial Sequence: Synthetic primer
  Description of Combined DNA/RNA Molecule: Synthetic primer

SEQ ID NO: 7674 - DNA, 52 bp, Artificial Sequence; identical to SEQ ID NO: 5914
  Description of Artificial Sequence: Synthetic primer
  Description of Combined DNA/RNA Molecule: Synthetic primer

SEQ ID NO: 7675 - DNA, 57 bp, Artificial Sequence; identical to SEQ ID NO: 5915
  Description of Artificial Sequence: Synthetic primer
  Description of Combined DNA/RNA Molecule: Synthetic primer

SEQ ID NO: 7676 - DNA, 51 bp, Artificial Sequence; identical to SEQ ID NO: 5916
  Description of Artificial Sequence: Synthetic oligonucleotide
  Description of Combined DNA/RNA Molecule: Synthetic oligonucleotide

SEQ ID NO: 7677 - DNA, 54 bp, Artificial Sequence; identical to SEQ ID NO: 5917
  Description of Artificial Sequence: Synthetic oligonucleotide

SEQ ID NO: 7678 - DNA, 29 bp, Artificial Sequence
  Description of Artificial Sequence: Synthetic probe
cctgggacaggaggctacagagtcaggag

SEQ ID NO: 7679 - DNA, 19 bp, Artificial Sequence
  Description of Artificial Sequence: Synthetic primer
ttagccgccaaacgtacca

SEQ ID NO: 7680 - DNA, 20 bp, Artificial Sequence
  Description of Artificial Sequence: Synthetic primer
tactatcgtgttcctgccca

SEQ ID NO: 7681 - DNA, 57 bp, Artificial Sequence; identical to SEQ ID NO: 5921
  Description of Artificial Sequence: Synthetic primer
  Description of Combined DNA/RNA Molecule: Synthetic primer

SEQ ID NO: 7682 - DNA, 55 bp, Artificial Sequence; identical to SEQ ID NO: 5931
  Description of Artificial Sequence: Synthetic primer
  Description of Combined DNA/RNA Molecule: Synthetic primer

SEQ ID NO: 7683 - DNA, 52 bp, Artificial Sequence; identical to SEQ ID NO: 5932
  Description of Artificial Sequence: Synthetic primer
  Description of Combined DNA/RNA Molecule: Synthetic primer

SEQ ID NO: 7684 - DNA, 65 bp, Artificial Sequence; identical to SEQ ID NO: 5933
  Description of Artificial Sequence: Synthetic primer
  Description of Combined DNA/RNA Molecule: Synthetic primer

SEQ ID NO: 7685 - DNA, 43 bp, Artificial Sequence; identical to SEQ ID NO: 5934
  Description of Artificial Sequence: Synthetic oligonucleotide
  Description of Combined DNA/RNA Molecule: Synthetic oligonucleotide

SEQ ID NO: 7686 - DNA, 51 bp, Artificial Sequence; identical to SEQ ID NO: 5935
  Description of Artificial Sequence: Synthetic oligonucleotide

SEQ ID NO: 7687 - DNA, 33 bp, Artificial Sequence; identical to SEQ ID NO: 5936
  Description of Artificial Sequence: Synthetic probe

SEQ ID NO: 7688 - DNA, 19 bp, Artificial Sequence
  Description of Artificial Sequence: Synthetic primer
ttgcaaaccacccggacaa

SEQ ID NO: 7689 - DNA, 20 bp, Artificial Sequence
  Description of Artificial Sequence: Synthetic primer
taggagtcgatgctgaccaa

SEQ ID NO: 7690 - DNA, 59 bp, Artificial Sequence; identical to SEQ ID NO: 5939
  Description of Artificial Sequence: Synthetic primer
  Description of Combined DNA/RNA Molecule: Synthetic primer

SEQ ID NO: 7691 - DNA, 40 bp, Artificial Sequence; identical to SEQ ID NO: 5967
  Description of Artificial Sequence: Synthetic primer
  Description of Combined DNA/RNA Molecule: Synthetic primer

SEQ ID NO: 7692 - DNA, 40 bp, Artificial Sequence; identical to SEQ ID NO: 5968
  Description of Artificial Sequence: Synthetic primer
  Description of Combined DNA/RNA Molecule: Synthetic primer

SEQ ID NO: 7693 - DNA, 55 bp, Artificial Sequence; identical to SEQ ID NO: 5969
  Description of Artificial Sequence: Synthetic primer
  Description of Combined DNA/RNA Molecule: Synthetic primer

SEQ ID NO: 7694 - DNA, 43 bp, Artificial Sequence; identical to SEQ ID NO: 5970
  Description of Artificial Sequence: Synthetic oligonucleotide
  Description of Combined DNA/RNA Molecule: Synthetic oligonucleotide

SEQ ID NO: 7695 - DNA, 46 bp, Artificial Sequence; identical to SEQ ID NO: 5971
  Description of Artificial Sequence: Synthetic oligonucleotide

SEQ ID NO: 7696 - DNA, 27 bp, Artificial Sequence
  Description of Artificial Sequence: Synthetic probe
tttgagacaacatggaggagatggcag

SEQ ID NO: 7697 - DNA, 21 bp, Artificial Sequence
  Description of Artificial Sequence: Synthetic primer
tccgactttagtgcgtcacaa

SEQ ID NO: 7698 - DNA, 20 bp, Artificial Sequence
  Description of Artificial Sequence: Synthetic primer
tatacgagcgagacccacaa

SEQ ID NO: 7699 - DNA, 48 bp, Artificial Sequence; identical to SEQ ID NO: 5975
  Description of Artificial Sequence: Synthetic primer
  Description of Combined DNA/RNA Molecule: Synthetic primer

SEQ ID NO: 7700 - DNA, 51 bp, Artificial Sequence; identical to SEQ ID NO: 6110
  Description of Artificial Sequence: Synthetic primer
  Description of Combined DNA/RNA Molecule: Synthetic primer

SEQ ID NO: 7701 - DNA, 50 bp, Artificial Sequence; identical to SEQ ID NO: 6111
  Description of Artificial Sequence: Synthetic primer
  Description of Combined DNA/RNA Molecule: Synthetic primer

SEQ ID NO: 7702 - DNA, 50 bp, Artificial Sequence; identical to SEQ ID NO: 6112
  Description of Artificial Sequence: Synthetic primer
  Description of Combined DNA/RNA Molecule: Synthetic primer

SEQ ID NO: 7703 - DNA, 50 bp, Artificial Sequence; identical to SEQ ID NO: 6113
  Description of Artificial Sequence: Synthetic oligonucleotide
  Description of Combined DNA/RNA Molecule: Synthetic oligonucleotide

SEQ ID NO: 7704 - DNA, 47 bp, Artificial Sequence; identical to SEQ ID NO: 6114
  Description of Artificial Sequence: Synthetic oligonucleotide

SEQ ID NO: 7705 - DNA, 23 bp, Artificial Sequence
  Description of Artificial Sequence: Synthetic probe
aaccaggcatcccacacagcagt

SEQ ID NO: 7706 - DNA, 20 bp, Artificial Sequence
  Description of Artificial Sequence: Synthetic primer
tctacagctagatgcggcca

SEQ ID NO: 7707 - DNA, 20 bp, Artificial Sequence
  Description of Artificial Sequence: Synthetic primer
tcgacagagtaacggagcca

SEQ ID NO: 7708 - DNA, 45 bp, Artificial Sequence; identical to SEQ ID NO: 6118
  Description of Artificial Sequence: Synthetic primer
  Description of Combined DNA/RNA Molecule: Synthetic primer

SEQ ID NO: 7709 - DNA, 48 bp, Artificial Sequence; identical to SEQ ID NO: 6128
  Description of Artificial Sequence: Synthetic primer
  Description of Combined DNA/RNA Molecule: Synthetic primer

SEQ ID NO: 7710 - DNA, 42 bp, Artificial Sequence; identical to SEQ ID NO: 6129
  Description of Artificial Sequence: Synthetic primer
  Description of Combined DNA/RNA Molecule: Synthetic primer

SEQ ID NO: 7711 - DNA, 51 bp, Artificial Sequence; identical to SEQ ID NO: 6130
  Description of Artificial Sequence: Synthetic primer
  Description of Combined DNA/RNA Molecule: Synthetic primer

SEQ ID NO: 7712 - DNA, 44 bp, Artificial Sequence; identical to SEQ ID NO: 6131
  Description of Artificial Sequence: Synthetic oligonucleotide
  Description of Combined DNA/RNA Molecule: Synthetic oligonucleotide

SEQ ID NO: 7713 - DNA, 45 bp, Artificial Sequence; identical to SEQ ID NO: 6132
  Description of Artificial Sequence: Synthetic oligonucleotide

SEQ ID NO: 7714 - DNA, 29 bp, Artificial Sequence
  Description of Artificial Sequence: Synthetic probe
ttcacaacactttgcaaagccagcctctg

SEQ ID NO: 7715 - DNA, 19 bp, Artificial Sequence
  Description of Artificial Sequence: Synthetic primer
tccagggtatttggcgcac

SEQ ID NO: 7716 - DNA, 20 bp, Artificial Sequence
  Description of Artificial Sequence: Synthetic primer
tcgacgataggtttccgcac

SEQ ID NO: 7717 - DNA, 46 bp, Artificial Sequence; identical to SEQ ID NO: 6136
  Description of Artificial Sequence: Synthetic primer
  Description of Combined DNA/RNA Molecule: Synthetic primer

SEQ ID NO: 7718 - DNA, 38 bp, Artificial Sequence; identical to SEQ ID NO: 6182
  Description of Artificial Sequence: Synthetic primer
  Description of Combined DNA/RNA Molecule: Synthetic primer

SEQ ID NO: 7719 - DNA, 38 bp, Artificial Sequence; identical to SEQ ID NO: 6183
  Description of Artificial Sequence: Synthetic primer
  Description of Combined DNA/RNA Molecule: Synthetic primer

SEQ ID NO: 7720 - DNA, 52 bp, Artificial Sequence; identical to SEQ ID NO: 6184
  Description of Artificial Sequence: Synthetic primer
  Description of Combined DNA/RNA Molecule: Synthetic primer

SEQ ID NO: 7721 - DNA, 52 bp, Artificial Sequence; identical to SEQ ID NO: 6185
  Description of Artificial Sequence: Synthetic oligonucleotide
  Description of Combined DNA/RNA Molecule: Synthetic oligonucleotide

SEQ ID NO: 7722 - DNA, 54 bp, Artificial Sequence; identical to SEQ ID NO: 6186
  Description of Artificial Sequence: Synthetic oligonucleotide

SEQ ID NO: 7723 - DNA, 29 bp, Artificial Sequence
  Description of Artificial Sequence: Synthetic probe
tttcacgcacacacacacacacactgttc

SEQ ID NO: 7724 - DNA, 20 bp, Artificial Sequence
  Description of Artificial Sequence: Synthetic primer
tatggactgtaccagcccaa

SEQ ID NO: 7725 - DNA, 21 bp, Artificial Sequence
  Description of Artificial Sequence: Synthetic primer
tgaacaccgcctcagtttcaa

SEQ ID NO: 7726 - DNA, 52 bp, Artificial Sequence; identical to SEQ ID NO: 6190
  Description of Artificial Sequence: Synthetic primer
  Description of Combined DNA/RNA Molecule: Synthetic primer

SEQ ID NO: 7727 - DNA, 39 bp, Artificial Sequence; identical to SEQ ID NO: 6191
  Description of Artificial Sequence: Synthetic primer
  Description of Combined DNA/RNA Molecule: Synthetic primer

SEQ ID NO: 7728 - DNA, 38 bp, Artificial Sequence; identical to SEQ ID NO: 6192
  Description of Artificial Sequence: Synthetic primer
  Description of Combined DNA/RNA Molecule: Synthetic primer

SEQ ID NO: 7729 - DNA, 55 bp, Artificial Sequence; identical to SEQ ID NO: 6193
  Description of Artificial Sequence: Synthetic primer
  Description of Combined DNA/RNA Molecule: Synthetic primer

SEQ ID NO: 7730 - DNA, 57 bp, Artificial Sequence; identical to SEQ ID NO: 6194
  Description of Artificial Sequence: Synthetic oligonucleotide
  Description of Combined DNA/RNA Molecule: Synthetic oligonucleotide

SEQ ID NO: 7731 - DNA, 55 bp, Artificial Sequence; identical to SEQ ID NO: 6195
  Description of Artificial Sequence: Synthetic oligonucleotide

SEQ ID NO: 7732 - DNA, 33 bp, Artificial Sequence; identical to SEQ ID NO: 6196
  Description of Artificial Sequence: Synthetic probe

SEQ ID NO: 7733 - DNA, 22 bp, Artificial Sequence
  Description of Artificial Sequence: Synthetic primer
tgtgcactagtccacgtgaaac

SEQ ID NO: 7734 - DNA, 22 bp, Artificial Sequence
  Description of Artificial Sequence: Synthetic primer
tgaatgcaaagatcgcggaaac

SEQ ID NO: 7735 - DNA, 50 bp, Artificial Sequence; identical to SEQ ID NO: 6199
  Description of Artificial Sequence: Synthetic primer
  Description of Combined DNA/RNA Molecule: Synthetic primer

SEQ ID NO: 7736 - DNA, 39 bp, Artificial Sequence; identical to SEQ ID NO: 6837
  Description of Artificial Sequence: Synthetic primer
  Description of Combined DNA/RNA Molecule: Synthetic primer

SEQ ID NO: 7737 - DNA, 40 bp, Artificial Sequence; identical to SEQ ID NO: 6838
  Description of Artificial Sequence: Synthetic primer
  Description of Combined DNA/RNA Molecule: Synthetic primer

SEQ ID NO: 7738 - DNA, 53 bp, Artificial Sequence; identical to SEQ ID NO: 6839
  Description of Artificial Sequence: Synthetic primer
  Description of Combined DNA/RNA Molecule: Synthetic primer

SEQ ID NO: 7739 - DNA, 50 bp, Artificial Sequence; identical to SEQ ID NO: 6840
  Description of Artificial Sequence: Synthetic oligonucleotide
  Description of Combined DNA/RNA Molecule: Synthetic oligonucleotide

SEQ ID NO: 7740 - DNA, 41 bp, Artificial Sequence; identical to SEQ ID NO: 6841
  Description of Artificial Sequence: Synthetic oligonucleotide

SEQ ID NO: 7741 - DNA, 19 bp, Artificial Sequence
  Description of Artificial Sequence: Synthetic probe
aagagcgcagggcctggag

SEQ ID NO: 7742 - DNA, 21 bp, Artificial Sequence
  Description of Artificial Sequence: Synthetic primer
tcacagagacttgccgatcac

SEQ ID NO: 7743 - DNA, 22 bp, Artificial Sequence
  Description of Artificial Sequence: Synthetic primer
tggccatgtctaagctacacac

SEQ ID NO: 7744 - DNA, 46 bp, Artificial Sequence; identical to SEQ ID NO: 6845
  Description of Artificial Sequence: Synthetic primer
  Description of Combined DNA/RNA Molecule: Synthetic primer

SEQ ID NO: 7745 - DNA, 36 bp, Artificial Sequence; identical to SEQ ID NO: 5531
  Description of Artificial Sequence: Synthetic primer
  Description of Combined DNA/RNA Molecule: Synthetic primer

SEQ ID NO: 7746 - DNA, 37 bp, Artificial Sequence; identical to SEQ ID NO: 6928
  Description of Artificial Sequence: Synthetic primer
  Description of Combined DNA/RNA Molecule: Synthetic primer

SEQ ID NO: 7747 - DNA, 58 bp, Artificial Sequence; identical to SEQ ID NO: 6929
  Description of Artificial Sequence: Synthetic primer
  Description of Combined DNA/RNA Molecule: Synthetic primer

SEQ ID NO: 7748 - DNA, 53 bp, Artificial Sequence; identical to SEQ ID NO: 6930
  Description of Artificial Sequence: Synthetic oligonucleotide
  Description of Combined DNA/RNA Molecule: Synthetic oligonucleotide

SEQ ID NO: 7749 - DNA, 42 bp, Artificial Sequence; identical to SEQ ID NO: 6931
  Description of Artificial Sequence: Synthetic oligonucleotide

SEQ ID NO: 7750 - DNA, 22 bp, Artificial Sequence
  Description of Artificial Sequence: Synthetic probe
ttcaagccagccccaagccacc

SEQ ID NO: 7751 - DNA, 22 bp, Artificial Sequence
  Description of Artificial Sequence: Synthetic primer
tgatgctggcaaaccctagaac

SEQ ID NO: 7752 - DNA, 20 bp, Artificial Sequence
  Description of Artificial Sequence: Synthetic primer
tggcctaacggtgatggaac

SEQ ID NO: 7753 - DNA, 44 bp, Artificial Sequence; identical to SEQ ID NO: 6935
  Description of Artificial Sequence: Synthetic primer
  Description of Combined DNA/RNA Molecule: Synthetic primer

SEQ ID NO: 7754 - DNA, 45 bp, Artificial Sequence
  Description of Artificial Sequence: Synthetic primer
  Description of Combined DNA/RNA Molecule: Synthetic primer
acgacgacgacgaacacattggtgcaactgcacaacaacaaggcg

SEQ ID NO: 7755 - DNA, 47 bp, Artificial Sequence
  Description of Artificial Sequence: Synthetic primer
  Description of Combined DNA/RNA Molecule: Synthetic primer
acgacgacgacgaacacagagacatccacacattggtgcaacugcat

SEQ ID NO: 7756 - DNA, 54 bp, Artificial Sequence
  Description of Artificial Sequence: Synthetic primer
  Description of Combined DNA/RNA Molecule: Synthetic primer
acgacgacgacttgacgaacataatctcaagcacactcctgtgtgcacactcat

SEQ ID NO: 7757 - DNA, 43 bp, Artificial Sequence
  Description of Artificial Sequence: Synthetic oligonucleotide
  Description of Combined DNA/RNA Molecule: Synthetic oligonucleotide
tgagcaaaatcttcgtcgaccgcaggcaggctggtacauacga

SEQ ID NO: 7758 - DNA, 54 bp, Artificial Sequence
  Description of Artificial Sequence: Synthetic oligonucleotide
tacaggcaggatggagtgagtgtgtgcagaaatgggttcgatgccttccgtaca

SEQ ID NO: 7759 - DNA, 31 bp, Artificial Sequence
  Description of Artificial Sequence: Synthetic probe
tttggtacatacaggcaggatggagtgagtg

SEQ ID NO: 7760 - DNA, 21 bp, Artificial Sequence
  Description of Artificial Sequence: Synthetic primer
tgagcaaaatcttcgtcgacc

SEQ ID NO: 7761 - DNA, 20 bp, Artificial Sequence
  Description of Artificial Sequence: Synthetic primer
tgtacggaaggcatcgaacc

SEQ ID NO: 7762 - DNA, 52 bp, Artificial Sequence
  Description of Artificial Sequence: Synthetic primer
  Description of Combined DNA/RNA Molecule: Synthetic primer
tgtacggaaggcatcgaacccactcctgtgtgcacactcacatttttgcacg

SEQ ID NO: 7763 - DNA, 44 bp, Artificial Sequence
  Description of Artificial Sequence: Synthetic primer
  Description of Combined DNA/RNA Molecule: Synthetic primer
acgacgacgacgaactgcaaggtggacaactacaccacaacagc

SEQ ID NO: 7764 - DNA, 39 bp, Artificial Sequence
  Description of Artificial Sequence: Synthetic primer
  Description of Combined DNA/RNA Molecule: Synthetic primer
acgacgacgacgaagcagctcctgcaaggtggacaactg

SEQ ID NO: 7765 - DNA, 49 bp, Artificial Sequence
  Description of Artificial Sequence: Synthetic primer
  Description of Combined DNA/RNA Molecule: Synthetic primer
acgacgacgacttgacgaacataatcctcctcccctggctgctcctcta

SEQ ID NO: 7766 - DNA, 50 bp, Artificial Sequence
  Description of Artificial Sequence: Synthetic oligonucleotide
  Description of Combined DNA/RNA Molecule: Synthetic oligonucleotide
tgccctatcgaaaaggacaacaggaagtcaccaagctcaggaacagacga

SEQ ID NO: 7767 - DNA, 45 bp, Artificial Sequence
  Description of Artificial Sequence: Synthetic oligonucleotide
gacaggctcagaggaggagaggcatgtttgcggctgtctatgaca

SEQ ID NO: 7768 - DNA, 26 bp, Artificial Sequence
  Description of Artificial Sequence: Synthetic probe
aaaggaacagacaggctcagaggagg

SEQ ID NO: 7769 - DNA, 22 bp, Artificial Sequence
  Description of Artificial Sequence: Synthetic primer
tgccctatcgaaaaggacaaca

SEQ ID NO: 7770 - DNA, 21 bp, Artificial Sequence
  Description of Artificial Sequence: Synthetic primer
tgtcatagacagccgcaaaca

SEQ ID NO: 7771 - DNA, 45 bp, Artificial Sequence
  Description of Artificial Sequence: Synthetic primer
  Description of Combined DNA/RNA Molecule: Synthetic primer
tgtcatagacagccgcaaacaccctggctgctcctctgttggcta

SEQ ID NO: 7772 - DNA, 39 bp, Artificial Sequence
  Description of Artificial Sequence: Synthetic primer
  Description of Combined DNA/RNA Molecule: Synthetic primer
acgacgacgacgaacccaagggccttgggactcagttcc

SEQ ID NO: 7773 - DNA, 37 bp, Artificial Sequence
  Description of Artificial Sequence: Synthetic primer
  Description of Combined DNA/RNA Molecule: Synthetic primer
acgacgacgacgaagggacatgcccaagggccutgga

SEQ ID NO: 7774 - DNA, 53 bp, Artificial Sequence
  Description of Artificial Sequence: Synthetic primer
  Description of Combined DNA/RNA Molecule: Synthetic primer
acgacgacgacttgacgaacataatctccagggtggacttgcacatcaggcag

SEQ ID NO: 7775 - DNA, 44 bp, Artificial Sequence
  Description of Artificial Sequence: Synthetic oligonucleotide
  Description of Combined DNA/RNA Molecule: Synthetic oligonucleotide
ttttccgcgtcagagcacaggctctgaggcatcacaacaggttg

SEQ ID NO: 7776 - DNA, 52 bp, Artificial Sequence
  Description of Artificial Sequence: Synthetic oligonucleotide
ggtcaggacaacaggctacaggcagagacatgttatcggacctagctcgaca

SEQ ID NO: 7777 - DNA, 30 bp, Artificial Sequence
  Description of Artificial Sequence: Synthetic probe
cccacaacaggtcaggacaacaggctacag

SEQ ID NO: 7778 - DNA, 19 bp, Artificial Sequence
  Description of Artificial Sequence: Synthetic primer
ttttccgcgtcagagcaca

SEQ ID NO: 7779 - DNA, 22 bp, Artificial Sequence
  Description of Artificial Sequence: Synthetic primer
tgtcgagctaggtccgataaca

SEQ ID NO: 7780 - DNA, 48 bp, Artificial Sequence
  Description of Artificial Sequence: Synthetic primer
  Description of Combined DNA/RNA Molecule: Synthetic primer
tgtcgagctaggtccgataacagcaagccctggctgtgtctttgccta

SEQ ID NO: 7781 - DNA, 48 bp, Artificial Sequence
  Description of Artificial Sequence: Synthetic primer
  Description of Combined DNA/RNA Molecule: Synthetic primer
acgacgacgacgaacaagacattccatggaggcagagtttacaatgtg

SEQ ID NO: 7782 - DNA, 50 bp, Artificial Sequence
  Description of Artificial Sequence: Synthetic primer
  Description of Combined DNA/RNA Molecule: Synthetic primer
acgacgacgacgaagacattccatggaggcagagtttacaatgtauccag

SEQ ID NO: 7783 - DNA, 53 bp, Artificial Sequence
  Description of Artificial Sequence: Synthetic primer
  Description of Combined DNA/RNA Molecule: Synthetic primer
acgacgacgacttgacgaacataatcactctgtgccccttgatctcccaggcc

SEQ ID NO: 7784 - DNA, 48 bp, Artificial Sequence
  Description of Artificial Sequence: Synthetic oligonucleotide
  Description of Combined DNA/RNA Molecule: Synthetic oligonucleotide
ttcgctgcccggttaaacaccaagtctgacagccccagaagcaggtac

SEQ ID NO: 7785 - DNA, 44 bp, Artificial Sequence
  Description of Artificial Sequence: Synthetic oligonucleotide
ggtgtgcagggcacccattgggtgttatcggacctagctcgaca

SEQ ID NO: 7786 - DNA, 24 bp, Artificial Sequence
  Description of Artificial Sequence: Synthetic probe
ttagaagcaggtgtgcagggcacc

SEQ ID NO: 7787 - DNA, 19 bp, Artificial Sequence
  Description of Artificial Sequence: Synthetic primer
ttcgctgcccggttaaaca

SEQ ID NO: 7788 - DNA, 22 bp, Artificial Sequence
  Description of Artificial Sequence: Synthetic primer
tgtcgagctaggtccgataaca

SEQ ID NO: 7789 - DNA, 53 bp, Artificial Sequence
  Description of Artificial Sequence: Synthetic primer
  Description of Combined DNA/RNA Molecule: Synthetic primer
tgtcgagctaggtccgataacaccaggctctttctgcagtcatactatggact

SEQ ID NO: 7790 - DNA, 41 bp, Artificial Sequence
  Description of Artificial Sequence: Synthetic primer
  Description of Combined DNA/RNA Molecule: Synthetic primer
acgacgacgacgaagcacactctcacacatgggccacagcc

SEQ ID NO: 7791 - DNA, 42 bp, Artificial Sequence
  Description of Artificial Sequence: Synthetic primer
  Description of Combined DNA/RNA Molecule: Synthetic primer
acgacgacgacgaacactctcacacatgggccacagcuggcg

SEQ ID NO: 7792 - DNA, 52 bp, Artificial Sequence
  Description of Artificial Sequence: Synthetic primer
  Description of Combined DNA/RNA Molecule: Synthetic primer
acgacgacgacttgacgaacataatgctgataccagcctgcacttgcugtgt

SEQ ID NO: 7793 - DNA, 46 bp, Artificial Sequence
  Description of Artificial Sequence: Synthetic oligonucleotide
  Description of Combined DNA/RNA Molecule: Synthetic oligonucleotide
tgctatgccgcattcaaccaccaggtggaagagcagcaacauggat

SEQ ID NO: 7794 - DNA, 39 bp, Artificial Sequence
  Description of Artificial Sequence: Synthetic oligonucleotide
tgggcagcccagcacagcactggagctagttcggcgaca

SEQ ID NO: 7795 - DNA, 22 bp, Artificial Sequence
  Description of Artificial Sequence: Synthetic probe
ttagcaacatgggcagcccagc

SEQ ID NO: 7796 - DNA, 20 bp, Artificial Sequence
  Description of Artificial Sequence: Synthetic primer
tgctatgccgcattcaacca

SEQ ID NO: 7797 - DNA, 19 bp, Artificial Sequence
  Description of Artificial Sequence: Synthetic primer
tgtcgccgaactagctcca

SEQ ID NO: 7798 - DNA, 44 bp, Artificial Sequence
  Description of Artificial Sequence: Synthetic primer
  Description of Combined DNA/RNA Molecule: Synthetic primer
tgtcgccgaactagctccacagcctgcacttgctgtgttgtgcc

SEQ ID NO: 7799 - DNA, 42 bp, Artificial Sequence
  Description of Artificial Sequence: Synthetic primer
  Description of Combined DNA/RNA Molecule: Synthetic primer
acgacgacgacgaacaaccctaggctctggcctaccaggaga

SEQ ID NO: 7800 - DNA, 41 bp, Artificial Sequence
  Description of Artificial Sequence: Synthetic primer
  Description of Combined DNA/RNA Molecule: Synthetic primer
acgacgacgacgaacctaggctctggcctaccaggagggcg

SEQ ID NO: 7801 - DNA, 57 bp, Artificial Sequence
  Description of Artificial Sequence: Synthetic primer
  Description of Combined DNA/RNA Molecule: Synthetic primer
acgacgacgacttgacgaacataatgctatcttgcagctcaggcttatgctagagcc

SEQ ID NO: 7802 - DNA, 46 bp, Artificial Sequence
  Description of Artificial Sequence: Synthetic oligonucleotide
  Description of Combined DNA/RNA Molecule: Synthetic oligonucleotide
tcctgctctgaaaacctacaccgggcaaacacaggcactcaggttg

SEQ ID NO: 7803 - DNA, 50 bp, Artificial Sequence
  Description of Artificial Sequence: Synthetic oligonucleotide
ggtcacatcatcacttgcttgggagcacggttacataggcggcttagaca

SEQ ID NO: 7804 - DNA, 31 bp, Artificial Sequence
  Description of Artificial Sequence: Synthetic probe
ttgcactcaggtcacatcatcacttgcttgg

SEQ ID NO: 7805 - DNA, 22 bp, Artificial Sequence
  Description of Artificial Sequence: Synthetic primer
tcctgctctgaaaacctacacc

SEQ ID NO: 7806 - DNA, 22 bp, Artificial Sequence
  Description of Artificial Sequence: Synthetic primer
tgtctaagccgcctatgtaacc

SEQ ID NO: 7807 - DNA, 51 bp, Artificial Sequence
  Description of Artificial Sequence: Synthetic primer
  Description of Combined DNA/RNA Molecule: Synthetic primer
tgtctaagccgcctatgtaaccgctcaggcttatgctagagctgatgccct

SEQ ID NO: 7808 - DNA, 39 bp, Artificial Sequence
  Description of Artificial Sequence: Synthetic primer
  Description of Combined DNA/RNA Molecule: Synthetic primer
acgacgacgacgaaggcccttggactaggcaccagagcc

SEQ ID NO: 7809 - DNA, 41 bp, Artificial Sequence
  Description of Artificial Sequence: Synthetic primer
  Description of Combined DNA/RNA Molecule: Synthetic primer
acgacgacgacgaacccttggactaggcaccagagcugtcg

SEQ ID NO: 7810 - DNA, 50 bp, Artificial Sequence
  Description of Artificial Sequence: Synthetic primer
  Description of Combined DNA/RNA Molecule: Synthetic primer
acgacgacgacttgacgaacataatgctgaggaatgctgagtggcugtgt

SEQ ID NO: 7811 - DNA, 45 bp, Artificial Sequence
  Description of Artificial Sequence: Synthetic oligonucleotide
  Description of Combined DNA/RNA Molecule: Synthetic oligonucleotide
tttttacgcacagcaccacccaacagggcaaggtgtgacaggcga

SEQ ID NO: 7812 - DNA, 43 bp, Artificial Sequence
  Description of Artificial Sequence: Synthetic oligonucleotide
ggcagccaggagaggagacacggttacataggcggcttagaca

SEQ ID NO: 7813 - DNA, 23 bp, Artificial Sequence
  Description of Artificial Sequence: Synthetic probe
tttgtgacaggcagccaggagag

SEQ ID NO: 7814 - DNA, 20 bp, Artificial Sequence
  Description of Artificial Sequence: Synthetic primer
tttttacgcacagcaccacc

SEQ ID NO: 7815 - DNA, 22 bp, Artificial Sequence
  Description of Artificial Sequence: Synthetic primer
tgtctaagccgcctatgtaacc

SEQ ID NO: 7816 - DNA, 48 bp, Artificial Sequence
  Description of Artificial Sequence: Synthetic primer
  Description of Combined DNA/RNA Molecule: Synthetic primer
tgtctaagccgcctatgtaacccaggaggccacttggcactatgtcct

SEQ ID NO: 7817 - DNA, 41 bp, Artificial Sequence
  Description of Artificial Sequence: Synthetic primer
  Description of Combined DNA/RNA Molecule: Synthetic primer
acgacgacgacgaacccaagaaaggtggcagaggcagggaa

SEQ ID NO: 7818 - DNA, 40 bp, Artificial Sequence
  Description of Artificial Sequence: Synthetic primer
  Description of Combined DNA/RNA Molecule: Synthetic primer
acgacgacgacgaagggaggacaaggcagagagccacccg

SEQ ID NO: 7819 - DNA, 51 bp, Artificial Sequence
  Description of Artificial Sequence: Synthetic primer
  Description of Combined DNA/RNA Molecule: Synthetic primer
acgacgacgacttgacgaacataatgggctcttgggaaggtgtggagccta

SEQ ID NO: 7820 - DNA, 46 bp, Artificial Sequence
  Description of Artificial Sequence: Synthetic oligonucleotide
  Description of Combined DNA/RNA Molecule: Synthetic oligonucleotide
tggacacttcgcccttcttaacgggagaccctgcaggcgcagcttg

SEQ ID NO: 7821 - DNA, 47 bp, Artificial Sequence
  Description of Artificial Sequence: Synthetic oligonucleotide
gctcacacacacatccccagcttcccgtttgggatctgggcatcaca

SEQ ID NO: 7822 - DNA, 24 bp, Artificial Sequence
  Description of Artificial Sequence: Synthetic probe
ttaggcgcagctcacacacacatc

SEQ ID NO: 7823 - DNA, 22 bp, Artificial Sequence
  Description of Artificial Sequence: Synthetic primer
tggacacttcgcccttcttaac

SEQ ID NO: 7824 - DNA, 21 bp, Artificial Sequence
  Description of Artificial Sequence: Synthetic primer
tgtgatgcccagatcccaaac

SEQ ID NO: 7825 - DNA, 46 bp, Artificial Sequence
  Description of Artificial Sequence: Synthetic primer
  Description of Combined DNA/RNA Molecule: Synthetic primer
tgtgatgcccagatcccaaacgtgtggagcctgaggaagttgggag

SEQ ID NO: 7826 - DNA, 44 bp, Artificial Sequence
  Description of Artificial Sequence: Synthetic primer
  Description of Combined DNA/RNA Molecule: Synthetic primer
acgacgacgacgaagtgtgcatgtgcatgttcaggttcagttcc

SEQ ID NO: 7827 - DNA, 45 bp, Artificial Sequence
  Description of Artificial Sequence: Synthetic primer
  Description of Combined DNA/RNA Molecule: Synthetic primer
acgacgacgacgaatgcatgtgcatgttcaggttcagttcugtgc

SEQ ID NO: 7828 - DNA, 49 bp, Artificial Sequence
  Description of Artificial Sequence: Synthetic primer
  Description of Combined DNA/RNA Molecule: Synthetic primer
acgacgacgacttgacgaacataatgcccatcctgggtgagggcctgat

SEQ ID NO: 7829 - DNA, 47 bp, Artificial Sequence
  Description of Artificial Sequence: Synthetic oligonucleotide
  Description of Combined DNA/RNA Molecule: Synthetic oligonucleotide
tggaggccggagaaattaaacccacaggcctgctcagagccaggatt

SEQ ID NO: 7830 - DNA, 43 bp, Artificial Sequence
  Description of Artificial Sequence: Synthetic oligonucleotide
ggaccaccaggctgcatgtggggtttgggatctgggcatcaca

SEQ ID NO: 7831 - DNA, 23 bp, Artificial Sequence
  Description of Artificial Sequence: Synthetic probe
aaagagccaggaccaccaggctg

SEQ ID NO: 7832 - DNA, 21 bp, Artificial Sequence
  Description of Artificial Sequence: Synthetic primer
tggaggccggagaaattaaac

SEQ ID NO: 7833 - DNA, 21 bp, Artificial Sequence
  Description of Artificial Sequence: Synthetic primer
tgtgatgcccagatcccaaac

SEQ ID NO: 7834 - DNA, 46 bp, Artificial Sequence
  Description of Artificial Sequence: Synthetic primer
  Description of Combined DNA/RNA Molecule: Synthetic primer
tgtgatgcccagatcccaaaccctgacctggtggcccacgtgcagt

SEQ ID NO: 7835 - DNA, 44 bp, Artificial Sequence; identical to SEQ ID NO: 874
  Description of Artificial Sequence: Synthetic primer
  Description of Combined DNA/RNA Molecule: Synthetic primer

SEQ ID NO: 7836 - DNA, 60 bp, Artificial Sequence; identical to SEQ ID NO: 875
  Description of Artificial Sequence: Synthetic primer
  Description of Combined DNA/RNA Molecule: Synthetic primer

SEQ ID NO: 7837 - DNA, 54 bp, Artificial Sequence; identical to SEQ ID NO: 876
  Description of Artificial Sequence: Synthetic oligonucleotide
  Description of Combined DNA/RNA Molecule: Synthetic oligonucleotide

SEQ ID NO: 7838 - DNA, 52 bp, Artificial Sequence; identical to SEQ ID NO: 877
  Description of Artificial Sequence: Synthetic oligonucleotide

SEQ ID NO: 7839 - DNA, 31 bp, Artificial Sequence; identical to SEQ ID NO: 878
  Description of Artificial Sequence: Synthetic probe

SEQ ID NO: 7840 - DNA, 22 bp, Artificial Sequence
  Description of Artificial Sequence: Synthetic primer
tccaaacaagctgatccgtaca

SEQ ID NO: 7841 - DNA, 19 bp, Artificial Sequence
  Description of Artificial Sequence: Synthetic primer
tagtaaccgctccgacaca

SEQ ID NO: 7842 - DNA, 25 bp, Artificial Sequence
  Description of Artificial Sequence: Synthetic primer
  Description of Combined DNA/RNA Molecule: Synthetic primer
acgacgacgacttgacgaacataac

SEQ ID NO: 7843 - DNA, 43 bp, Artificial Sequence; identical to SEQ ID NO: 881
  Description of Artificial Sequence: Synthetic primer
  Description of Combined DNA/RNA Molecule: Synthetic primer

SEQ ID NO: 7844 - DNA, 41 bp, Artificial Sequence; identical to SEQ ID NO: 882
  Description of Artificial Sequence: Synthetic primer
  Description of Combined DNA/RNA Molecule: Synthetic primer

SEQ ID NO: 7845 - DNA, 51 bp, Artificial Sequence; identical to SEQ ID NO: 883
  Description of Artificial Sequence: Synthetic primer
  Description of Combined DNA/RNA Molecule: Synthetic primer

SEQ ID NO: 7846 - DNA, 47 bp, Artificial Sequence; identical to SEQ ID NO: 884
  Description of Artificial Sequence: Synthetic oligonucleotide
  Description of Combined DNA/RNA Molecule: Synthetic oligonucleotide

SEQ ID NO: 7847 - DNA, 42 bp, Artificial Sequence; identical to SEQ ID NO: 885
  Description of Artificial Sequence: Synthetic oligonucleotide

SEQ ID NO: 7848 - DNA, 22 bp, Artificial Sequence
  Description of Artificial Sequence: Synthetic probe
tttccctcagcccccaacacag

SEQ ID NO: 7849 - DNA, 20 bp, Artificial Sequence
  Description of Artificial Sequence: Synthetic primer
tagggcgacagttaccacaa

SEQ ID NO: 7850 - DNA, 20 bp, Artificial Sequence
  Description of Artificial Sequence: Synthetic primer
tatacgagcgagacccacaa

SEQ ID NO: 7851 - DNA, 46 bp, Artificial Sequence; identical to SEQ ID NO: 889
  Description of Artificial Sequence: Synthetic primer
  Description of Combined DNA/RNA Molecule: Synthetic primer

SEQ ID NO: 7852 - DNA, 37 bp, Artificial Sequence; identical to SEQ ID NO: 915
  Description of Artificial Sequence: Synthetic primer
  Description of Combined DNA/RNA Molecule: Synthetic primer

SEQ ID NO: 7853 - DNA, 41 bp, Artificial Sequence; identical to SEQ ID NO: 916
  Description of Artificial Sequence: Synthetic primer
  Description of Combined DNA/RNA Molecule: Synthetic primer

SEQ ID NO: 7854 - DNA, 50 bp, Artificial Sequence; identical to SEQ ID NO: 917
  Description of Artificial Sequence: Synthetic primer
  Description of Combined DNA/RNA Molecule: Synthetic primer

SEQ ID NO: 7855 - DNA, 42 bp, Artificial Sequence; identical to SEQ ID NO: 918
  Description of Artificial Sequence: Synthetic oligonucleotide
  Description of Combined DNA/RNA Molecule: Synthetic oligonucleotide

SEQ ID NO: 7856 - DNA, 44 bp, Artificial Sequence; identical to SEQ ID NO: 919
  Description of Artificial Sequence: Synthetic oligonucleotide

SEQ ID NO: 7857 - DNA, 28 bp, Artificial Sequence
  Description of Artificial Sequence: Synthetic probe
ttgcatacagcacatcagccaccagcac

SEQ ID NO: 7858 - DNA, 19 bp, Artificial Sequence
  Description of Artificial Sequence: Synthetic primer
tctgccagaacaccgacac

SEQ ID NO: 7859 - DNA, 19 bp, Artificial Sequence
  Description of Artificial Sequence: Synthetic primer
tcaccgtacgccaacacac

SEQ ID NO: 7860 - DNA, 44 bp, Artificial Sequence; identical to SEQ ID NO: 923
  Description of Artificial Sequence: Synthetic primer
  Description of Combined DNA/RNA Molecule: Synthetic primer

SEQ ID NO: 7861 - DNA, 47 bp, Artificial Sequence; identical to SEQ ID NO: 1190
  Description of Artificial Sequence: Synthetic primer
  Description of Combined DNA/RNA Molecule: Synthetic primer

SEQ ID NO: 7862 - DNA, 46 bp, Artificial Sequence; identical to SEQ ID NO: 1191
  Description of Artificial Sequence: Synthetic primer
  Description of Combined DNA/RNA Molecule: Synthetic primer

SEQ ID NO: 7863 - DNA, 51 bp, Artificial Sequence; identical to SEQ ID NO: 1192
  Description of Artificial Sequence: Synthetic primer
  Description of Combined DNA/RNA Molecule: Synthetic primer

SEQ ID NO: 7864 - DNA, 47 bp, Artificial Sequence; identical to SEQ ID NO: 1193
  Description of Artificial Sequence: Synthetic oligonucleotide
  Description of Combined DNA/RNA Molecule: Synthetic oligonucleotide

SEQ ID NO: 7865 - DNA, 46 bp, Artificial Sequence; identical to SEQ ID NO: 1194
  Description of Artificial Sequence: Synthetic oligonucleotide

SEQ ID NO: 7866 - DNA, 27 bp, Artificial Sequence
  Description of Artificial Sequence: Synthetic probe
ttgaagtcaagcatgggcaccaagcca

SEQ ID NO: 7867 - DNA, 22 bp, Artificial Sequence
  Description of Artificial Sequence: Synthetic primer
tacagatacggacgggaatcaa

SEQ ID NO: 7868 - DNA, 22 bp, Artificial Sequence
  Description of Artificial Sequence: Synthetic primer
tgacgcaggaggatgtaaacaa

SEQ ID NO: 7869 - DNA, 49 bp, Artificial Sequence; identical to SEQ ID NO: 1198
  Description of Artificial Sequence: Synthetic primer
  Description of Combined DNA/RNA Molecule: Synthetic primer

SEQ ID NO: 7870 - DNA, 42 bp, Artificial Sequence; identical to SEQ ID NO: 1199
  Description of Artificial Sequence: Synthetic primer
  Description of Combined DNA/RNA Molecule: Synthetic primer

SEQ ID NO: 7871 - DNA, 43 bp, Artificial Sequence; identical to SEQ ID NO: 1200
  Description of Artificial Sequence: Synthetic primer
  Description of Combined DNA/RNA Molecule: Synthetic primer

SEQ ID NO: 7872 - DNA, 49 bp, Artificial Sequence; identical to SEQ ID NO: 1201
  Description of Artificial Sequence: Synthetic primer
  Description of Combined DNA/RNA Molecule: Synthetic primer

SEQ ID NO: 7873 - DNA, 45 bp, Artificial Sequence; identical to SEQ ID NO: 1202
  Description of Artificial Sequence: Synthetic oligonucleotide
  Description of Combined DNA/RNA Molecule: Synthetic oligonucleotide

SEQ ID NO: 7874 - DNA, 45 bp, Artificial Sequence; identical to SEQ ID NO: 1203
  Description of Artificial Sequence: Synthetic oligonucleotide

SEQ ID NO: 7875 - DNA, 23 bp, Artificial Sequence
  Description of Artificial Sequence: Synthetic probe
ttaggcgcaacaggtcagggacc

SEQ ID NO: 7876 - DNA, 19 bp, Artificial Sequence
  Description of Artificial Sequence: Synthetic primer
ttggcgcaacggtttccaa

SEQ ID NO: 7877 - DNA, 22 bp, Artificial Sequence
  Description of Artificial Sequence: Synthetic primer
tgacgcaggaggatgtaaacaa

SEQ ID NO: 7878 - DNA, 43 bp, Artificial Sequence; identical to SEQ ID NO: 1207
  Description of Artificial Sequence: Synthetic primer
  Description of Combined DNA/RNA Molecule: Synthetic primer

SEQ ID NO: 7879 - DNA, 46 bp, Artificial Sequence; identical to SEQ ID NO: 1613
  Description of Artificial Sequence: Synthetic primer
  Description of Combined DNA/RNA Molecule: Synthetic primer

SEQ ID NO: 7880 - DNA, 47 bp, Artificial Sequence; identical to SEQ ID NO: 1614
  Description of Artificial Sequence: Synthetic primer
  Description of Combined DNA/RNA Molecule: Synthetic primer

SEQ ID NO: 7881 - DNA, 54 bp, Artificial Sequence; identical to SEQ ID NO: 1615
  Description of Artificial Sequence: Synthetic primer
  Description of Combined DNA/RNA Molecule: Synthetic primer

SEQ ID NO: 7882 - DNA, 44 bp, Artificial Sequence; identical to SEQ ID NO: 1616
  Description of Artificial Sequence: Synthetic oligonucleotide
  Description of Combined DNA/RNA Molecule: Synthetic oligonucleotide

SEQ ID NO: 7883 - DNA, 40 bp, Artificial Sequence; identical to SEQ ID NO: 1617
  Description of Artificial Sequence: Synthetic oligonucleotide

SEQ ID NO: 7884 - DNA, 19 bp, Artificial Sequence
  Description of Artificial Sequence: Synthetic probe
ttacccccagcagccaccc

SEQ ID NO: 7885 - DNA, 19 bp, Artificial Sequence
  Description of Artificial Sequence: Synthetic primer
ttcgtccctgcacgctaac

SEQ ID NO: 7886 - DNA, 20 bp, Artificial Sequence
  Description of Artificial Sequence: Synthetic primer
tggcctaacggtgatggaac

SEQ ID NO: 7887 - DNA, 46 bp, Artificial Sequence; identical to SEQ ID NO: 1621
  Description of Artificial Sequence: Synthetic primer
  Description of Combined DNA/RNA Molecule: Synthetic primer

SEQ ID NO: 7888 - DNA, 43 bp, Artificial Sequence; identical to SEQ ID NO: 1817
  Description of Artificial Sequence: Synthetic primer
  Description of Combined DNA/RNA Molecule: Synthetic primer

SEQ ID NO: 7889 - DNA, 44 bp, Artificial Sequence; identical to SEQ ID NO: 1818
  Description of Artificial Sequence: Synthetic primer
  Description of Combined DNA/RNA Molecule: Synthetic primer

SEQ ID NO: 7890 - DNA, 48 bp, Artificial Sequence; identical to SEQ ID NO: 1819
  Description of Artificial Sequence: Synthetic primer
  Description of Combined DNA/RNA Molecule: Synthetic primer

SEQ ID NO: 7891 - DNA, 45 bp, Artificial Sequence; identical to SEQ ID NO: 1820
  Description of Artificial Sequence: Synthetic oligonucleotide
  Description of Combined DNA/RNA Molecule: Synthetic oligonucleotide

SEQ ID NO: 7892 - DNA, 46 bp, Artificial Sequence; identical to SEQ ID NO: 1821
  Description of Artificial Sequence: Synthetic oligonucleotide

SEQ ID NO: 7893 - DNA, 26 bp, Artificial Sequence
  Description of Artificial Sequence: Synthetic probe
ttgacaacacttcccacccacctgcc

SEQ ID NO: 7894 - DNA, 19 bp, Artificial Sequence
  Description of Artificial Sequence: Synthetic primer
ttcgctgcccggttaaaca

SEQ ID NO: 7895 - DNA, 22 bp, Artificial Sequence
  Description of Artificial Sequence: Synthetic primer
tgtcgagctaggtccgataaca

SEQ ID NO: 7896 - DNA, 47 bp, Artificial Sequence; identical to SEQ ID NO: 1825
  Description of Artificial Sequence: Synthetic primer
  Description of Combined DNA/RNA Molecule: Synthetic primer

SEQ ID NO: 7897 - DNA, 40 bp, Artificial Sequence; identical to SEQ ID NO: 1826
  Description of Artificial Sequence: Synthetic primer
  Description of Combined DNA/RNA Molecule: Synthetic primer

SEQ ID NO: 7898 - DNA, 39 bp, Artificial Sequence; identical to SEQ ID NO: 1827
  Description of Artificial Sequence: Synthetic primer
  Description of Combined DNA/RNA Molecule: Synthetic primer

SEQ ID NO: 7899 - DNA, 52 bp, Artificial Sequence; identical to SEQ ID NO: 1828
  Description of Artificial Sequence: Synthetic primer
  Description of Combined DNA/RNA Molecule: Synthetic primer

SEQ ID NO: 7900 - DNA, 42 bp, Artificial Sequence; identical to SEQ ID NO: 1829
  Description of Artificial Sequence: Synthetic oligonucleotide
  Description of Combined DNA/RNA Molecule: Synthetic oligonucleotide

SEQ ID NO: 7901 - DNA, 43 bp, Artificial Sequence; identical to SEQ ID NO: 1830
  Description of Artificial Sequence: Synthetic oligonucleotide

SEQ ID NO: 7902 - DNA, 23 bp, Artificial Sequence
  Description of Artificial Sequence: Synthetic probe
aaggtgtcaggcagggctgcact

SEQ ID NO: 7903 - DNA, 19 bp, Artificial Sequence
  Description of Artificial Sequence: Synthetic primer
ttcgctgcccggttaaaca

SEQ ID NO: 7904 - DNA, 22 bp, Artificial Sequence
  Description of Artificial Sequence: Synthetic primer
tgtcgagctaggtccgataaca

SEQ ID NO: 7905 - DNA, 45 bp, Artificial Sequence; identical to SEQ ID NO: 1834
  Description of Artificial Sequence: Synthetic primer
  Description of Combined DNA/RNA Molecule: Synthetic primer

SEQ ID NO: 7906 - DNA, 38 bp, Artificial Sequence; identical to SEQ ID NO: 5172
  Description of Artificial Sequence: Synthetic primer
  Description of Combined DNA/RNA Molecule: Synthetic primer

SEQ ID NO: 7907 - DNA, 37 bp, Artificial Sequence; identical to SEQ ID NO: 5173
  Description of Artificial Sequence: Synthetic primer
  Description of Combined DNA/RNA Molecule: Synthetic primer

SEQ ID NO: 7908 - DNA, 47 bp, Artificial Sequence; identical to SEQ ID NO: 5174
  Description of Artificial Sequence: Synthetic primer
  Description of Combined DNA/RNA Molecule: Synthetic primer

SEQ ID NO: 7909 - DNA, 46 bp, Artificial Sequence; identical to SEQ ID NO: 5175
  Description of Artificial Sequence: Synthetic oligonucleotide
  Description of Combined DNA/RNA Molecule: Synthetic oligonucleotide

SEQ ID NO: 7910 - DNA, 49 bp, Artificial Sequence; identical to SEQ ID NO: 5176
  Description of Artificial Sequence: Synthetic oligonucleotide

SEQ ID NO: 7911 - DNA, 22 bp, Artificial Sequence
  Description of Artificial Sequence: Synthetic probe
tttggcgcagagcacacagctg

SEQ ID NO: 7912 - DNA, 20 bp, Artificial Sequence
  Description of Artificial Sequence: Synthetic primer
tatggactgtaccagcccaa

SEQ ID NO: 7913 - DNA, 21 bp, Artificial Sequence
  Description of Artificial Sequence: Synthetic primer
tgaacaccgcctcagtttcaa

SEQ ID NO: 7914 - DNA, 48 bp, Artificial Sequence; identical to SEQ ID NO: 5180
  Description of Artificial Sequence: Synthetic primer
  Description of Combined DNA/RNA Molecule: Synthetic primer

SEQ ID NO: 7915 - DNA, 38 bp, Artificial Sequence; identical to SEQ ID NO: 5181
  Description of Artificial Sequence: Synthetic primer
  Description of Combined DNA/RNA Molecule: Synthetic primer

SEQ ID NO: 7916 - DNA, 42 bp, Artificial Sequence; identical to SEQ ID NO: 5182
  Description of Artificial Sequence: Synthetic primer
  Description of Combined DNA/RNA Molecule: Synthetic primer

SEQ ID NO: 7917 - DNA, 53 bp, Artificial Sequence; identical to SEQ ID NO: 5183
  Description of Artificial Sequence: Synthetic primer
  Description of Combined DNA/RNA Molecule: Synthetic primer

SEQ ID NO: 7918 - DNA, 45 bp, Artificial Sequence; identical to SEQ ID NO: 5184
  Description of Artificial Sequence: Synthetic oligonucleotide
  Description of Combined DNA/RNA Molecule: Synthetic oligonucleotide

SEQ ID NO: 7919 - DNA, 49 bp, Artificial Sequence; identical to SEQ ID NO: 5185
  Description of Artificial Sequence: Synthetic oligonucleotide

SEQ ID NO: 7920 - DNA, 28 bp, Artificial Sequence
  Description of Artificial Sequence: Synthetic probe
ttcagcccagtcccattatcccaagcac

SEQ ID NO: 7921 - DNA, 20 bp, Artificial Sequence
  Description of Artificial Sequence: Synthetic primer
tttgcctcttgtaggtgcca

SEQ ID NO: 7922 - DNA, 19 bp, Artificial Sequence
  Description of Artificial Sequence: Synthetic primer
tgaatatccgcgttgccca

SEQ ID NO: 7923 - DNA, 49 bp, Artificial Sequence; identical to SEQ ID NO: 5189
  Description of Artificial Sequence: Synthetic primer
  Description of Combined DNA/RNA Molecule: Synthetic primer

SEQ ID NO: 7924 - DNA, 38 bp, Artificial Sequence; identical to SEQ ID NO: 5190
  Description of Artificial Sequence: Synthetic primer
  Description of Combined DNA/RNA Molecule: Synthetic primer

SEQ ID NO: 7925 - DNA, 40 bp, Artificial Sequence; identical to SEQ ID NO: 5191
  Description of Artificial Sequence: Synthetic primer
  Description of Combined DNA/RNA Molecule: Synthetic primer

SEQ ID NO: 7926 - DNA, 54 bp, Artificial Sequence; identical to SEQ ID NO: 5192
  Description of Artificial Sequence: Synthetic primer
  Description of Combined DNA/RNA Molecule: Synthetic primer

SEQ ID NO: 7927 - DNA, 45 bp, Artificial Sequence; identical to SEQ ID NO: 5193
  Description of Artificial Sequence: Synthetic oligonucleotide
  Description of Combined DNA/RNA Molecule: Synthetic oligonucleotide

SEQ ID NO: 7928 - DNA, 42 bp, Artificial Sequence; identical to SEQ ID NO: 5194
  Description of Artificial Sequence: Synthetic oligonucleotide

SEQ ID NO: 7929 - DNA, 23 bp, Artificial Sequence
  Description of Artificial Sequence: Synthetic probe
ttcaagacaggaggagccagggc

SEQ ID NO: 7930 - DNA, 21 bp, Artificial Sequence
  Description of Artificial Sequence: Synthetic primer
tgtcgcccggtagcaataaac

SEQ ID NO: 7931 - DNA, 22 bp, Artificial Sequence
  Description of Artificial Sequence: Synthetic primer
tgaatgcaaagatcgcggaaac

SEQ ID NO: 7932 - DNA, 43 bp, Artificial Sequence; identical to SEQ ID NO: 5198
  Description of Artificial Sequence: Synthetic primer
  Description of Combined DNA/RNA Molecule: Synthetic primer

SEQ ID NO: 7933 - DNA, 37 bp, Artificial Sequence; identical to SEQ ID NO: 5199
  Description of Artificial Sequence: Synthetic primer
  Description of Combined DNA/RNA Molecule: Synthetic primer

SEQ ID NO: 7934 - DNA, 38 bp, Artificial Sequence; identical to SEQ ID NO: 5200
  Description of Artificial Sequence: Synthetic primer
  Description of Combined DNA/RNA Molecule: Synthetic primer

SEQ ID NO: 7935 - DNA, 54 bp, Artificial Sequence; identical to SEQ ID NO: 5201
  Description of Artificial Sequence: Synthetic primer
  Description of Combined DNA/RNA Molecule: Synthetic primer

SEQ ID NO: 7936 - DNA, 46 bp, Artificial Sequence; identical to SEQ ID NO: 5202
  Description of Artificial Sequence: Synthetic oligonucleotide
  Description of Combined DNA/RNA Molecule: Synthetic oligonucleotide

SEQ ID NO: 7937 - DNA, 55 bp, Artificial Sequence; identical to SEQ ID NO: 5203
  Description of Artificial Sequence: Synthetic oligonucleotide

SEQ ID NO: 7938 - DNA, 31 bp, Artificial Sequence; identical to SEQ ID NO: 5204
  Description of Artificial Sequence: Synthetic probe

SEQ ID NO: 7939 - DNA, 22 bp, Artificial Sequence
  Description of Artificial Sequence: Synthetic primer
tgtgcactagtccacgtgaaac

SEQ ID NO: 7940 - DNA, 22 bp, Artificial Sequence
  Description of Artificial Sequence: Synthetic primer
tgaatgcaaagatcgcggaaac

SEQ ID NO: 7941 - DNA, 52 bp, Artificial Sequence; identical to SEQ ID NO: 5207
  Description of Artificial Sequence: Synthetic primer
  Description of Combined DNA/RNA Molecule: Synthetic primer

SEQ ID NO: 7942 - DNA, 38 bp, Artificial Sequence; identical to SEQ ID NO: 5217
  Description of Artificial Sequence: Synthetic primer
  Description of Combined DNA/RNA Molecule: Synthetic primer

SEQ ID NO: 7943 - DNA, 39 bp, Artificial Sequence; identical to SEQ ID NO: 5218
  Description of Artificial Sequence: Synthetic primer
  Description of Combined DNA/RNA Molecule: Synthetic primer

SEQ ID NO: 7944 - DNA, 51 bp, Artificial Sequence; identical to SEQ ID NO: 5219
  Description of Artificial Sequence: Synthetic primer
  Description of Combined DNA/RNA Molecule: Synthetic primer

SEQ ID NO: 7945 - DNA, 49 bp, Artificial Sequence; identical to SEQ ID NO: 5220
  Description of Artificial Sequence: Synthetic oligonucleotide
  Description of Combined DNA/RNA Molecule: Synthetic oligonucleotide

SEQ ID NO: 7946 - DNA, 45 bp, Artificial Sequence; identical to SEQ ID NO: 5221
  Description of Artificial Sequence: Synthetic oligonucleotide

SEQ ID NO: 7947 - DNA, 28 bp, Artificial Sequence
  Description of Artificial Sequence: Synthetic probe
ttcacttcatagctgcaggcaccaccac

SEQ ID NO: 7948 - DNA, 19 bp, Artificial Sequence
  Description of Artificial Sequence: Synthetic primer
ttggcgcaacggtttccaa

SEQ ID NO: 7949 - DNA, 22 bp, Artificial Sequence
  Description of Artificial Sequence: Synthetic primer
tgacgcaggaggatgtaaacaa

SEQ ID NO: 7950 - DNA, 53 bp, Artificial Sequence; identical to SEQ ID NO: 5225
  Description of Artificial Sequence: Synthetic primer
  Description of Combined DNA/RNA Molecule: Synthetic primer

SEQ ID NO: 7951 - DNA, 45 bp, Artificial Sequence; identical to SEQ ID NO: 363
  Description of Artificial Sequence: Synthetic primer
  Description of Combined DNA/RNA Molecule: Synthetic primer

SEQ ID NO: 7952 - DNA, 48 bp, Artificial Sequence; identical to SEQ ID NO: 5227
  Description of Artificial Sequence: Synthetic primer
  Description of Combined DNA/RNA Molecule: Synthetic primer

SEQ ID NO: 7953 - DNA, 51 bp, Artificial Sequence; identical to SEQ ID NO: 5228
  Description of Artificial Sequence: Synthetic oligonucleotide
  Description of Combined DNA/RNA Molecule: Synthetic oligonucleotide

SEQ ID NO: 7954 - DNA, 50 bp, Artificial Sequence; identical to SEQ ID NO: 5229
  Description of Artificial Sequence: Synthetic oligonucleotide

SEQ ID NO: 7955 - DNA, 31 bp, Artificial Sequence; identical to SEQ ID NO: 5230
  Description of Artificial Sequence: Synthetic probe

SEQ ID NO: 7956 - DNA, 19 bp, Artificial Sequence
  Description of Artificial Sequence: Synthetic primer
ttcagcagcctggcatcac

SEQ ID NO: 7957 - DNA, 19 bp, Artificial Sequence
  Description of Artificial Sequence: Synthetic primer
tgcaaccttagcgctccac

SEQ ID NO: 7958 - DNA, 43 bp, Artificial Sequence; identical to SEQ ID NO: 5233
  Description of Artificial Sequence: Synthetic primer
  Description of Combined DNA/RNA Molecule: Synthetic primer

SEQ ID NO: 7959 - DNA, 37 bp, Artificial Sequence; identical to SEQ ID NO: 5243
  Description of Artificial Sequence: Synthetic primer
  Description of Combined DNA/RNA Molecule: Synthetic primer

SEQ ID NO: 7960 - DNA, 38 bp, Artificial Sequence; identical to SEQ ID NO: 5244
  Description of Artificial Sequence: Synthetic primer
  Description of Combined DNA/RNA Molecule: Synthetic primer

SEQ ID NO: 7961 - DNA, 53 bp, Artificial Sequence; identical to SEQ ID NO: 5245
  Description of Artificial Sequence: Synthetic primer
  Description of Combined DNA/RNA Molecule: Synthetic primer

SEQ ID NO: 7962 - DNA, 46 bp, Artificial Sequence; identical to SEQ ID NO: 5246
  Description of Artificial Sequence: Synthetic oligonucleotide
  Description of Combined DNA/RNA Molecule: Synthetic oligonucleotide

SEQ ID NO: 7963 - DNA, 43 bp, Artificial Sequence; identical to SEQ ID NO: 5247
  Description of Artificial Sequence: Synthetic oligonucleotide

SEQ ID NO: 7964 - DNA, 23 bp, Artificial Sequence
  Description of Artificial Sequence: Synthetic probe
ttctgaacaggtggagctgcagc

SEQ ID NO: 7965 - DNA, 22 bp, Artificial Sequence
  Description of Artificial Sequence: Synthetic primer
tatcgcatcaaatggagagcaa

SEQ ID NO: 7966 - DNA, 22 bp, Artificial Sequence
  Description of Artificial Sequence: Synthetic primer
tgcaacgtataacagcggtcaa

SEQ ID NO: 7967 - DNA, 50 bp, Artificial Sequence; identical to SEQ ID NO: 5251
  Description of Artificial Sequence: Synthetic primer
  Description of Combined DNA/RNA Molecule: Synthetic primer

SEQ ID NO: 7968 - DNA, 40 bp, Artificial Sequence; identical to SEQ ID NO: 5261
  Description of Artificial Sequence: Synthetic primer
  Description of Combined DNA/RNA Molecule: Synthetic primer

SEQ ID NO: 7969 - DNA, 45 bp, Artificial Sequence; identical to SEQ ID NO: 5262
  Description of Artificial Sequence: Synthetic primer
  Description of Combined DNA/RNA Molecule: Synthetic primer

SEQ ID NO: 7970 - DNA, 53 bp, Artificial Sequence; identical to SEQ ID NO: 5263
  Description of Artificial Sequence: Synthetic primer
  Description of Combined DNA/RNA Molecule: Synthetic primer

SEQ ID NO: 7971 - DNA, 43 bp, Artificial Sequence; identical to SEQ ID NO: 5264
  Description of Artificial Sequence: Synthetic oligonucleotide
  Description of Combined DNA/RNA Molecule: Synthetic oligonucleotide

SEQ ID NO: 7972 - DNA, 41 bp, Artificial Sequence; identical to SEQ ID NO: 5265
  Description of Artificial Sequence: Synthetic oligonucleotide

SEQ ID NO: 7973 - DNA, 24 bp, Artificial Sequence
  Description of Artificial Sequence: Synthetic probe
ttcaggtcagcaggcccagggaag

SEQ ID NO: 7974 - DNA, 19 bp, Artificial Sequence
  Description of Artificial Sequence: Synthetic primer
tagacacgagcgaggtcac

SEQ ID NO: 7975 - DNA, 21 bp, Artificial Sequence
  Description of Artificial Sequence: Synthetic primer
tgcacagcctgaattttgcac

SEQ ID NO: 7976 - DNA, 46 bp, Artificial Sequence; identical to SEQ ID NO: 5269
  Description of Artificial Sequence: Synthetic primer
  Description of Combined DNA/RNA Molecule: Synthetic primer

SEQ ID NO: 7977 - DNA, 39 bp, Artificial Sequence; identical to SEQ ID NO: 5270
  Description of Artificial Sequence: Synthetic primer
  Description of Combined DNA/RNA Molecule: Synthetic primer

SEQ ID NO: 7978 - DNA, 37 bp, Artificial Sequence; identical to SEQ ID NO: 5271
  Description of Artificial Sequence: Synthetic primer
  Description of Combined DNA/RNA Molecule: Synthetic primer

SEQ ID NO: 7979 - DNA, 55 bp, Artificial Sequence; identical to SEQ ID NO: 5272
  Description of Artificial Sequence: Synthetic primer
  Description of Combined DNA/RNA Molecule: Synthetic primer

SEQ ID NO: 7980 - DNA, 49 bp, Artificial Sequence; identical to SEQ ID NO: 5273
  Description of Artificial Sequence: Synthetic oligonucleotide
  Description of Combined DNA/RNA Molecule: Synthetic oligonucleotide

SEQ ID NO: 7981 - DNA, 48 bp, Artificial Sequence; identical to SEQ ID NO: 5274
  Description of Artificial Sequence: Synthetic oligonucleotide

SEQ ID NO: 7982 - DNA, 26 bp, Artificial Sequence
  Description of Artificial Sequence: Synthetic probe
tttggcgcacacaacttccaggacag

SEQ ID NO: 7983 - DNA, 20 bp, Artificial Sequence
  Description of Artificial Sequence: Synthetic primer
ttcttcacagtaccgccaca

SEQ ID NO: 7984 - DNA, 19 bp, Artificial Sequence
  Description of Artificial Sequence: Synthetic primer
tgcaccaccagacaacaca

SEQ ID NO: 7985 - DNA, 45 bp, Artificial Sequence; identical to SEQ ID NO: 5278
  Description of Artificial Sequence: Synthetic primer
  Description of Combined DNA/RNA Molecule: Synthetic primer

SEQ ID NO: 7986 - DNA, 38 bp, Artificial Sequence; identical to SEQ ID NO: 5279
  Description of Artificial Sequence: Synthetic primer
  Description of Combined DNA/RNA Molecule: Synthetic primer

SEQ ID NO: 7987 - DNA, 39 bp, Artificial Sequence; identical to SEQ ID NO: 5280
  Description of Artificial Sequence: Synthetic primer
  Description of Combined DNA/RNA Molecule: Synthetic primer

SEQ ID NO: 7988 - DNA, 46 bp, Artificial Sequence; identical to SEQ ID NO: 5281
  Description of Artificial Sequence: Synthetic primer
  Description of Combined DNA/RNA Molecule: Synthetic primer

SEQ ID NO: 7989 - DNA, 43 bp, Artificial Sequence; identical to SEQ ID NO: 5282
  Description of Artificial Sequence: Synthetic oligonucleotide
  Description of Combined DNA/RNA Molecule: Synthetic oligonucleotide

SEQ ID NO: 7990 - DNA, 41 bp, Artificial Sequence; identical to SEQ ID NO: 5283
  Description of Artificial Sequence: Synthetic oligonucleotide

SEQ ID NO: 7991 - DNA, 20 bp, Artificial Sequence
  Description of Artificial Sequence: Synthetic probe
ttagggccagggcacaggag

SEQ ID NO: 7992 - DNA, 20 bp, Artificial Sequence
  Description of Artificial Sequence: Synthetic primer
taccctcctagctccgtaca

SEQ ID NO: 7993 - DNA, 19 bp, Artificial Sequence
  Description of Artificial Sequence: Synthetic primer
tgcaccaccagacaacaca

SEQ ID NO: 7994 - DNA, 41 bp, Artificial Sequence; identical to SEQ ID NO: 5287
  Description of Artificial Sequence: Synthetic primer
  Description of Combined DNA/RNA Molecule: Synthetic primer

SEQ ID NO: 7995 - DNA, 48 bp, Artificial Sequence; identical to SEQ ID NO: 5288
  Description of Artificial Sequence: Synthetic primer
  Description of Combined DNA/RNA Molecule: Synthetic primer

SEQ ID NO: 7996 - DNA, 46 bp, Artificial Sequence; identical to SEQ ID NO: 5289
  Description of Artificial Sequence: Synthetic primer
  Description of Combined DNA/RNA Molecule: Synthetic primer

SEQ ID NO: 7997 - DNA, 52 bp, Artificial Sequence; identical to SEQ ID NO: 5290
  Description of Artificial Sequence: Synthetic primer
  Description of Combined DNA/RNA Molecule: Synthetic primer

SEQ ID NO: 7998 - DNA, 47 bp, Artificial Sequence; identical to SEQ ID NO: 5291
  Description of Artificial Sequence: Synthetic oligonucleotide
  Description of Combined DNA/RNA Molecule: Synthetic oligonucleotide

SEQ ID NO: 7999 - DNA, 50 bp, Artificial Sequence; identical to SEQ ID NO: 5292
  Description of Artificial Sequence: Synthetic oligonucleotide

SEQ ID NO: 8000 - DNA, 29 bp, Artificial Sequence
  Description of Artificial Sequence: Synthetic probe
aactcttcagcaggtagcacaccttgtcc

SEQ ID NO: 8001 - DNA, 21 bp, Artificial Sequence
  Description of Artificial Sequence: Synthetic primer
tcatcgccctcagatcttcca

SEQ ID NO: 8002 - DNA, 21 bp, Artificial Sequence
  Description of Artificial Sequence: Synthetic primer
tgccctccaatctatcctcca

SEQ ID NO: 8003 - DNA, 47 bp, Artificial Sequence; identical to SEQ ID NO: 5296
  Description of Artificial Sequence: Synthetic primer
  Description of Combined DNA/RNA Molecule: Synthetic primer

SEQ ID NO: 8004 - DNA, 41 bp, Artificial Sequence; identical to SEQ ID NO: 5297
  Description of Artificial Sequence: Synthetic primer
  Description of Combined DNA/RNA Molecule: Synthetic primer

SEQ ID NO: 8005 - DNA, 42 bp, Artificial Sequence; identical to SEQ ID NO: 5298
  Description of Artificial Sequence: Synthetic primer
  Description of Combined DNA/RNA Molecule: Synthetic primer

SEQ ID NO: 8006 - DNA, 51 bp, Artificial Sequence; identical to SEQ ID NO: 5299
  Description of Artificial Sequence: Synthetic primer
  Description of Combined DNA/RNA Molecule: Synthetic primer

SEQ ID NO: 8007 - DNA, 45 bp, Artificial Sequence; identical to SEQ ID NO: 5300
  Description of Artificial Sequence: Synthetic oligonucleotide
  Description of Combined DNA/RNA Molecule: Synthetic oligonucleotide

SEQ ID NO: 8008 - DNA, 46 bp, Artificial Sequence; identical to SEQ ID NO: 5301
  Description of Artificial Sequence: Synthetic oligonucleotide

SEQ ID NO: 8009 - DNA, 23 bp, Artificial Sequence
  Description of Artificial Sequence: Synthetic probe
ccgaggtcaggagtcagcccacc

SEQ ID NO: 8010 - DNA, 19 bp, Artificial Sequence
  Description of Artificial Sequence: Synthetic primer
taaccagttaccaccgcca

SEQ ID NO: 8011 - DNA, 21 bp, Artificial Sequence
  Description of Artificial Sequence: Synthetic primer
tgccctccaatctatcctcca

SEQ ID NO: 8012 - DNA, 49 bp, Artificial Sequence; identical to SEQ ID NO: 5305
  Description of Artificial Sequence: Synthetic primer
  Description of Combined DNA/RNA Molecule: Synthetic primer

SEQ ID NO: 8013 - DNA, 40 bp, Artificial Sequence; identical to SEQ ID NO: 5306
  Description of Artificial Sequence: Synthetic primer
  Description of Combined DNA/RNA Molecule: Synthetic primer

SEQ ID NO: 8014 - DNA, 40 bp, Artificial Sequence; identical to SEQ ID NO: 5307
  Description of Artificial Sequence: Synthetic primer
  Description of Combined DNA/RNA Molecule: Synthetic primer

SEQ ID NO: 8015 - DNA, 51 bp, Artificial Sequence; identical to SEQ ID NO: 5308
  Description of Artificial Sequence: Synthetic primer
  Description of Combined DNA/RNA Molecule: Synthetic primer

SEQ ID NO: 8016 - DNA, 50 bp, Artificial Sequence; identical to SEQ ID NO: 5309
  Description of Artificial Sequence: Synthetic oligonucleotide
  Description of Combined DNA/RNA Molecule: Synthetic oligonucleotide

SEQ ID NO: 8017 - DNA, 47 bp, Artificial Sequence; identical to SEQ ID NO: 5310
  Description of Artificial Sequence: Synthetic oligonucleotide

SEQ ID NO: 8018 - DNA, 28 bp, Artificial Sequence
  Description of Artificial Sequence: Synthetic probe
ttgcaaacaggcacaccagagaacccaa

SEQ ID NO: 8019 - DNA, 19 bp, Artificial Sequence
  Description of Artificial Sequence: Synthetic primer
tcgcaccggaattctgacc

SEQ ID NO: 8020 - DNA, 20 bp, Artificial Sequence
  Description of Artificial Sequence: Synthetic primer
tgccgtcatgggaaactacc

SEQ ID NO: 8021 - DNA, 45 bp, Artificial Sequence; identical to SEQ ID NO: 5314
  Description of Artificial Sequence: Synthetic primer
  Description of Combined DNA/RNA Molecule: Synthetic primer

SEQ ID NO: 8022 - DNA, 39 bp, Artificial Sequence; identical to SEQ ID NO: 5315
  Description of Artificial Sequence: Synthetic primer
  Description of Combined DNA/RNA Molecule: Synthetic primer

SEQ ID NO: 8023 - DNA, 39 bp, Artificial Sequence; identical to SEQ ID NO: 5316
  Description of Artificial Sequence: Synthetic primer
  Description of Combined DNA/RNA Molecule: Synthetic primer

SEQ ID NO: 8024 - DNA, 50 bp, Artificial Sequence; identical to SEQ ID NO: 5317
  Description of Artificial Sequence: Synthetic primer
  Description of Combined DNA/RNA Molecule: Synthetic primer

SEQ ID NO: 8025 - DNA, 51 bp, Artificial Sequence; identical to SEQ ID NO: 5318
  Description of Artificial Sequence: Synthetic oligonucleotide
  Description of Combined DNA/RNA Molecule: Synthetic oligonucleotide

SEQ ID NO: 8026 - DNA, 51 bp, Artificial Sequence; identical to SEQ ID NO: 5319
  Description of Artificial Sequence: Synthetic oligonucleotide

SEQ ID NO: 8027 - DNA, 29 bp, Artificial Sequence
  Description of Artificial Sequence: Synthetic probe
ttcccagcaccatgtgcctcaaccataac

SEQ ID NO: 8028 - DNA, 19 bp, Artificial Sequence
  Description of Artificial Sequence: Synthetic primer
ttgcacgttgtcctgcacc

SEQ ID NO: 8029 - DNA, 20 bp, Artificial Sequence
  Description of Artificial Sequence: Synthetic primer
tgccgtcatgggaaactacc

SEQ ID NO: 8030 - DNA, 44 bp, Artificial Sequence; identical to SEQ ID NO: 5323
  Description of Artificial Sequence: Synthetic primer
  Description of Combined DNA/RNA Molecule: Synthetic primer

SEQ ID NO: 8031 - DNA, 37 bp, Artificial Sequence; identical to SEQ ID NO: 5324
  Description of Artificial Sequence: Synthetic primer
  Description of Combined DNA/RNA Molecule: Synthetic primer

SEQ ID NO: 8032 - DNA, 39 bp, Artificial Sequence; identical to SEQ ID NO: 5325
  Description of Artificial Sequence: Synthetic primer
  Description of Combined DNA/RNA Molecule: Synthetic primer

SEQ ID NO: 8033 - DNA, 52 bp, Artificial Sequence; identical to SEQ ID NO: 5326
  Description of Artificial Sequence: Synthetic primer
  Description of Combined DNA/RNA Molecule: Synthetic primer

SEQ ID NO: 8034 - DNA, 42 bp, Artificial Sequence; identical to SEQ ID NO: 5327
  Description of Artificial Sequence: Synthetic oligonucleotide
  Description of Combined DNA/RNA Molecule: Synthetic oligonucleotide

SEQ ID NO: 8035 - DNA, 47 bp, Artificial Sequence; identical to SEQ ID NO: 5328
  Description of Artificial Sequence: Synthetic oligonucleotide

SEQ ID NO: 8036 - DNA, 26 bp, Artificial Sequence
  Description of Artificial Sequence: Synthetic probe
ttaggctcacacagcactgtctgcag

SEQ ID NO: 8037 - DNA, 19 bp, Artificial Sequence
  Description of Artificial Sequence: Synthetic primer
tgcttacccacgatgcacc

SEQ ID NO: 8038 - DNA, 20 bp, Artificial Sequence
  Description of Artificial Sequence: Synthetic primer
tgcgagcaagtcatacgacc

SEQ ID NO: 8039 - DNA, 56 bp, Artificial Sequence; identical to SEQ ID NO: 5332
  Description of Artificial Sequence: Synthetic primer
  Description of Combined DNA/RNA Molecule: Synthetic primer

SEQ ID NO: 8040 - DNA, 37 bp, Artificial Sequence; identical to SEQ ID NO: 5333
  Description of Artificial Sequence: Synthetic primer
  Description of Combined DNA/RNA Molecule: Synthetic primer

SEQ ID NO: 8041 - DNA, 41 bp, Artificial Sequence; identical to SEQ ID NO: 5334
  Description of Artificial Sequence: Synthetic primer
  Description of Combined DNA/RNA Molecule: Synthetic primer

SEQ ID NO: 8042 - DNA, 50 bp, Artificial Sequence; identical to SEQ ID NO: 5335
  Description of Artificial Sequence: Synthetic primer
  Description of Combined DNA/RNA Molecule: Synthetic primer

SEQ ID NO: 8043 - DNA, 44 bp, Artificial Sequence; identical to SEQ ID NO: 5336
  Description of Artificial Sequence: Synthetic oligonucleotide
  Description of Combined DNA/RNA Molecule: Synthetic oligonucleotide

SEQ ID NO: 8044 - DNA, 42 bp, Artificial Sequence; identical to SEQ ID NO: 5337
  Description of Artificial Sequence: Synthetic oligonucleotide

SEQ ID NO: 8045 - DNA, 27 bp, Artificial Sequence
  Description of Artificial Sequence: Synthetic probe
ttaatctcagaggcccacagccagtca

SEQ ID NO: 8046 - DNA, 19 bp, Artificial Sequence
  Description of Artificial Sequence: Synthetic primer
ttacaggccgcatagcaac

SEQ ID NO: 8047 - DNA, 19 bp, Artificial Sequence
  Description of Artificial Sequence: Synthetic primer
tgcgagcccatgtctcaac

SEQ ID NO: 8048 - DNA, 51 bp, Artificial Sequence; identical to SEQ ID NO: 5341
  Description of Artificial Sequence: Synthetic primer
  Description of Combined DNA/RNA Molecule: Synthetic primer

SEQ ID NO: 8049 - DNA, 44 bp, Artificial Sequence; identical to SEQ ID NO: 5342
  Description of Artificial Sequence: Synthetic primer
  Description of Combined DNA/RNA Molecule: Synthetic primer

SEQ ID NO: 8050 - DNA, 49 bp, Artificial Sequence; identical to SEQ ID NO: 5343
  Description of Artificial Sequence: Synthetic primer
  Description of Combined DNA/RNA Molecule: Synthetic primer

SEQ ID NO: 8051 - DNA, 48 bp, Artificial Sequence; identical to SEQ ID NO: 5344
  Description of Artificial Sequence: Synthetic primer
  Description of Combined DNA/RNA Molecule: Synthetic primer

SEQ ID NO: 8052 - DNA, 44 bp, Artificial Sequence; identical to SEQ ID NO: 5345
  Description of Artificial Sequence: Synthetic oligonucleotide
  Description of Combined DNA/RNA Molecule: Synthetic oligonucleotide

SEQ ID NO: 8053 - DNA, 41 bp, Artificial Sequence; identical to SEQ ID NO: 5346
  Description of Artificial Sequence: Synthetic oligonucleotide

SEQ ID NO: 8054 - DNA, 25 bp, Artificial Sequence
  Description of Artificial Sequence: Synthetic probe
tttcctacagccagtgcctccacac

SEQ ID NO: 8055 - DNA, 19 bp, Artificial Sequence
  Description of Artificial Sequence: Synthetic primer
ttcgcctaccgcagtgaac

SEQ ID NO: 8056 - DNA, 19 bp, Artificial Sequence
  Description of Artificial Sequence: Synthetic primer
tgcgagcccatgtctcaac

SEQ ID NO: 8057 - DNA, 44 bp, Artificial Sequence; identical to SEQ ID NO: 5350
  Description of Artificial Sequence: Synthetic primer
  Description of Combined DNA/RNA Molecule: Synthetic primer

SEQ ID NO: 8058 - DNA, 45 bp, Artificial Sequence; identical to SEQ ID NO: 5351
  Description of Artificial Sequence: Synthetic primer
  Description of Combined DNA/RNA Molecule: Synthetic primer

SEQ ID NO: 8059 - DNA, 46 bp, Artificial Sequence; identical to SEQ ID NO: 5352
  Description of Artificial Sequence: Synthetic primer
  Description of Combined DNA/RNA Molecule: Synthetic primer

SEQ ID NO: 8060 - DNA, 53 bp, Artificial Sequence; identical to SEQ ID NO: 5353
  Description of Artificial Sequence: Synthetic primer
  Description of Combined DNA/RNA Molecule: Synthetic primer

SEQ ID NO: 8061 - DNA, 56 bp, Artificial Sequence; identical to SEQ ID NO: 5354
  Description of Artificial Sequence: Synthetic oligonucleotide
  Description of Combined DNA/RNA Molecule: Synthetic oligonucleotide

SEQ ID NO: 8062 - DNA, 44 bp, Artificial Sequence; identical to SEQ ID NO: 5355
  Description of Artificial Sequence: Synthetic oligonucleotide

SEQ ID NO: 8063 - DNA, 26 bp, Artificial Sequence
  Description of Artificial Sequence: Synthetic probe
ttaactccagcccacttctccaaggg

SEQ ID NO: 8064 - DNA, 21 bp, Artificial Sequence
  Description of Artificial Sequence: Synthetic primer
ttgcatttcgttagcgacaca

SEQ ID NO: 8065 - DNA, 20 bp, Artificial Sequence
  Description of Artificial Sequence: Synthetic primer
tgcgggtagatcgactcaca

SEQ ID NO: 8066 - DNA, 51 bp, Artificial Sequence; identical to SEQ ID NO: 5359
  Description of Artificial Sequence: Synthetic primer
  Description of Combined DNA/RNA Molecule: Synthetic primer

SEQ ID NO: 8067 - DNA, 38 bp, Artificial Sequence; identical to SEQ ID NO: 5360
  Description of Artificial Sequence: Synthetic primer
  Description of Combined DNA/RNA Molecule: Synthetic primer

SEQ ID NO: 8068 - DNA, 40 bp, Artificial Sequence; identical to SEQ ID NO: 5361
  Description of Artificial Sequence: Synthetic primer
  Description of Combined DNA/RNA Molecule: Synthetic primer

SEQ ID NO: 8069 - DNA, 52 bp, Artificial Sequence; identical to SEQ ID NO: 5362
  Description of Artificial Sequence: Synthetic primer
  Description of Combined DNA/RNA Molecule: Synthetic primer

SEQ ID NO: 8070 - DNA, 48 bp, Artificial Sequence; identical to SEQ ID NO: 5363
  Description of Artificial Sequence: Synthetic oligonucleotide
  Description of Combined DNA/RNA Molecule: Synthetic oligonucleotide

SEQ ID NO: 8071 - DNA, 44 bp, Artificial Sequence; identical to SEQ ID NO: 5364
  Description of Artificial Sequence: Synthetic oligonucleotide

SEQ ID NO: 8072 - DNA, 26 bp, Artificial Sequence
  Description of Artificial Sequence: Synthetic probe
ttgcactcagacacacaccacccagg

SEQ ID NO: 8073 - DNA, 21 bp, Artificial Sequence
  Description of Artificial Sequence: Synthetic primer
ttgcatttcgttagcgacaca

SEQ ID NO: 8074 - DNA, 20 bp, Artificial Sequence
  Description of Artificial Sequence: Synthetic primer
tgcgggtagatcgactcaca

SEQ ID NO: 8075 - DNA, 47 bp, Artificial Sequence; identical to SEQ ID NO: 5368
  Description of Artificial Sequence: Synthetic primer
  Description of Combined DNA/RNA Molecule: Synthetic primer

SEQ ID NO: 8076 - DNA, 39 bp, Artificial Sequence; identical to SEQ ID NO: 5369
  Description of Artificial Sequence: Synthetic primer
  Description of Combined DNA/RNA Molecule: Synthetic primer

SEQ ID NO: 8077 - DNA, 41 bp, Artificial Sequence; identical to SEQ ID NO: 5370
  Description of Artificial Sequence: Synthetic primer
  Description of Combined DNA/RNA Molecule: Synthetic primer

SEQ ID NO: 8078 - DNA, 52 bp, Artificial Sequence; identical to SEQ ID NO: 5371
  Description of Artificial Sequence: Synthetic primer
  Description of Combined DNA/RNA Molecule: Synthetic primer

SEQ ID NO: 8079 - DNA, 48 bp, Artificial Sequence; identical to SEQ ID NO: 5372
  Description of Artificial Sequence: Synthetic oligonucleotide
  Description of Combined DNA/RNA Molecule: Synthetic oligonucleotide

SEQ ID NO: 8080 - DNA, 50 bp, Artificial Sequence; identical to SEQ ID NO: 5373
  Description of Artificial Sequence: Synthetic oligonucleotide

SEQ ID NO: 8081 - DNA, 30 bp, Artificial Sequence; identical to SEQ ID NO: 5374
  Description of Artificial Sequence: Synthetic probe

SEQ ID NO: 8082 - DNA, 21 bp, Artificial Sequence
  Description of Artificial Sequence: Synthetic primer
taccactcatcttctgcgaca

SEQ ID NO: 8083 - DNA, 20 bp, Artificial Sequence
  Description of Artificial Sequence: Synthetic primer
tgcgggtagatcgactcaca

SEQ ID NO: 8084 - DNA, 46 bp, Artificial Sequence; identical to SEQ ID NO: 5377
  Description of Artificial Sequence: Synthetic primer
  Description of Combined DNA/RNA Molecule: Synthetic primer

SEQ ID NO: 8085 - DNA, 41 bp, Artificial Sequence; identical to SEQ ID NO: 5378
  Description of Artificial Sequence: Synthetic primer
  Description of Combined DNA/RNA Molecule: Synthetic primer

SEQ ID NO: 8086 - DNA, 41 bp, Artificial Sequence; identical to SEQ ID NO: 5379
  Description of Artificial Sequence: Synthetic primer
  Description of Combined DNA/RNA Molecule: Synthetic primer

SEQ ID NO: 8087 - DNA, 54 bp, Artificial Sequence; identical to SEQ ID NO: 5380
  Description of Artificial Sequence: Synthetic primer
  Description of Combined DNA/RNA Molecule: Synthetic primer

SEQ ID NO: 8088 - DNA, 49 bp, Artificial Sequence; identical to SEQ ID NO: 5381
  Description of Artificial Sequence: Synthetic oligonucleotide
  Description of Combined DNA/RNA Molecule: Synthetic oligonucleotide

SEQ ID NO: 8089 - DNA, 54 bp, Artificial Sequence; identical to SEQ ID NO: 5382
  Description of Artificial Sequence: Synthetic oligonucleotide

SEQ ID NO: 8090 - DNA, 26 bp, Artificial Sequence
  Description of Artificial Sequence: Synthetic probe
ttggacgcaagagaaggcagcaccac

SEQ ID NO: 8091 - DNA, 22 bp, Artificial Sequence
  Description of Artificial Sequence: Synthetic primer
tctcatgggcgctagtatcaac

SEQ ID NO: 8092 - DNA, 22 bp, Artificial Sequence
  Description of Artificial Sequence: Synthetic primer
tgcgggtatcaatcagggaaac

SEQ ID NO: 8093 - DNA, 44 bp, Artificial Sequence; identical to SEQ ID NO: 5386
  Description of Artificial Sequence: Synthetic primer
  Description of Combined DNA/RNA Molecule: Synthetic primer

SEQ ID NO: 8094 - DNA, 41 bp, Artificial Sequence; identical to SEQ ID NO: 5387
  Description of Artificial Sequence: Synthetic primer
  Description of Combined DNA/RNA Molecule: Synthetic primer

SEQ ID NO: 8095 - DNA, 42 bp, Artificial Sequence; identical to SEQ ID NO: 5388
  Description of Artificial Sequence: Synthetic primer
  Description of Combined DNA/RNA Molecule: Synthetic primer

SEQ ID NO: 8096 - DNA, 49 bp, Artificial Sequence; identical to SEQ ID NO: 5389
  Description of Artificial Sequence: Synthetic primer
  Description of Combined DNA/RNA Molecule: Synthetic primer

SEQ ID NO: 8097 - DNA, 46 bp, Artificial Sequence; identical to SEQ ID NO: 5390
  Description of Artificial Sequence: Synthetic oligonucleotide
  Description of Combined DNA/RNA Molecule: Synthetic oligonucleotide

SEQ ID NO: 8098 - DNA, 49 bp, Artificial Sequence; identical to SEQ ID NO: 5391
  Description of Artificial Sequence: Synthetic oligonucleotide

SEQ ID NO: 8099 - DNA, 29 bp, Artificial Sequence
  Description of Artificial Sequence: Synthetic probe
ttaggaacaacaggcaacattggtaggga

SEQ ID NO: 8100 - DNA, 21 bp, Artificial Sequence
  Description of Artificial Sequence: Synthetic primer
tggatcgagacggaatgcaac

SEQ ID NO: 8101 - DNA, 22 bp, Artificial Sequence
  Description of Artificial Sequence: Synthetic primer
tgcgggtatcaatcagggaaac

SEQ ID NO: 8102 - DNA, 50 bp, Artificial Sequence; identical to SEQ ID NO: 5395
  Description of Artificial Sequence: Synthetic primer
  Description of Combined DNA/RNA Molecule: Synthetic primer

SEQ ID NO: 8103 - DNA, 40 bp, Artificial Sequence; identical to SEQ ID NO: 5396
  Description of Artificial Sequence: Synthetic primer
  Description of Combined DNA/RNA Molecule: Synthetic primer

SEQ ID NO: 8104 - DNA, 40 bp, Artificial Sequence; identical to SEQ ID NO: 5397
  Description of Artificial Sequence: Synthetic primer
  Description of Combined DNA/RNA Molecule: Synthetic primer

SEQ ID NO: 8105 - DNA, 50 bp, Artificial Sequence; identical to SEQ ID NO: 5398
  Description of Artificial Sequence: Synthetic primer
  Description of Combined DNA/RNA Molecule: Synthetic primer

SEQ ID NO: 8106 - DNA, 46 bp, Artificial Sequence; identical to SEQ ID NO: 5399
  Description of Artificial Sequence: Synthetic oligonucleotide
  Description of Combined DNA/RNA Molecule: Synthetic oligonucleotide

SEQ ID NO: 8107 - DNA, 43 bp, Artificial Sequence; identical to SEQ ID NO: 5400
  Description of Artificial Sequence: Synthetic oligonucleotide

SEQ ID NO: 8108 - DNA, 20 bp, Artificial Sequence
  Description of Artificial Sequence: Synthetic probe
ttcccaccaggagccagcac

SEQ ID NO: 8109 - DNA, 19 bp, Artificial Sequence
  Description of Artificial Sequence: Synthetic primer
ttgcaacaggctaccgacc

SEQ ID NO: 8110 - DNA, 21 bp, Artificial Sequence
  Description of Artificial Sequence: Synthetic primer
tgcgtgacttccttacctacc

SEQ ID NO: 8111 - DNA, 46 bp, Artificial Sequence; identical to SEQ ID NO: 5404
  Description of Artificial Sequence: Synthetic primer
  Description of Combined DNA/RNA Molecule: Synthetic primer

SEQ ID NO: 8112 - DNA, 41 bp, Artificial Sequence; identical to SEQ ID NO: 5773
  Description of Artificial Sequence: Synthetic primer
  Description of Combined DNA/RNA Molecule: Synthetic primer

SEQ ID NO: 8113 - DNA, 38 bp, Artificial Sequence; identical to SEQ ID NO: 5774
  Description of Artificial Sequence: Synthetic primer
  Description of Combined DNA/RNA Molecule: Synthetic primer

SEQ ID NO: 8114 - DNA, 50 bp, Artificial Sequence; identical to SEQ ID NO: 5775
  Description of Artificial Sequence: Synthetic primer
  Description of Combined DNA/RNA Molecule: Synthetic primer

SEQ ID NO: 8115 - DNA, 46 bp, Artificial Sequence; identical to SEQ ID NO: 5776
  Description of Artificial Sequence: Synthetic oligonucleotide
  Description of Combined DNA/RNA Molecule: Synthetic oligonucleotide

SEQ ID NO: 8116 - DNA, 42 bp, Artificial Sequence; identical to SEQ ID NO: 5777
  Description of Artificial Sequence: Synthetic oligonucleotide

SEQ ID NO: 8117 - DNA, 23 bp, Artificial Sequence
  Description of Artificial Sequence: Synthetic probe
ttcaagccacagctccctgccac

SEQ ID NO: 8118 - DNA, 20 bp, Artificial Sequence
  Description of Artificial Sequence: Synthetic primer
ttgtctctgcgacccatcaa

SEQ ID NO: 8119 - DNA, 19 bp, Artificial Sequence
  Description of Artificial Sequence: Synthetic primer
tgtgccgaacgtgtaccaa

SEQ ID NO: 8120 - DNA, 45 bp, Artificial Sequence; identical to SEQ ID NO: 5781
  Description of Artificial Sequence: Synthetic primer
  Description of Combined DNA/RNA Molecule: Synthetic primer

SEQ ID NO: 8121 - DNA, 38 bp, Artificial Sequence; identical to SEQ ID NO: 6819
  Description of Artificial Sequence: Synthetic primer
  Description of Combined DNA/RNA Molecule: Synthetic primer

SEQ ID NO: 8122 - DNA, 39 bp, Artificial Sequence; identical to SEQ ID NO: 6820
  Description of Artificial Sequence: Synthetic primer
  Description of Combined DNA/RNA Molecule: Synthetic primer

SEQ ID NO: 8123 - DNA, 56 bp, Artificial Sequence; identical to SEQ ID NO: 6821
  Description of Artificial Sequence: Synthetic primer
  Description of Combined DNA/RNA Molecule: Synthetic primer

SEQ ID NO: 8124 - DNA, 46 bp, Artificial Sequence; identical to SEQ ID NO: 6822
  Description of Artificial Sequence: Synthetic oligonucleotide
  Description of Combined DNA/RNA Molecule: Synthetic oligonucleotide

SEQ ID NO: 8125 - DNA, 49 bp, Artificial Sequence; identical to SEQ ID NO: 6823
  Description of Artificial Sequence: Synthetic oligonucleotide

SEQ ID NO: 8126 - DNA, 30 bp, Artificial Sequence; identical to SEQ ID NO: 6824
  Description of Artificial Sequence: Synthetic probe

SEQ ID NO: 8127 - DNA, 19 bp, Artificial Sequence
  Description of Artificial Sequence: Synthetic primer
ttgctgtgcgcggtagaac

SEQ ID NO: 8128 - DNA, 20 bp, Artificial Sequence
  Description of Artificial Sequence: Synthetic primer
tggcaccagcttagcgtaac

SEQ ID NO: 8129 - DNA, 51 bp, Artificial Sequence; identical to SEQ ID NO: 6827
  Description of Artificial Sequence: Synthetic primer
  Description of Combined DNA/RNA Molecule: Synthetic primer

SEQ ID NO: 8130 - DNA, 39 bp, Artificial Sequence; identical to SEQ ID NO: 6837
  Description of Artificial Sequence: Synthetic primer
  Description of Combined DNA/RNA Molecule: Synthetic primer

SEQ ID NO: 8131 - DNA, 40 bp, Artificial Sequence; identical to SEQ ID NO: 6838
  Description of Artificial Sequence: Synthetic primer
  Description of Combined DNA/RNA Molecule: Synthetic primer

SEQ ID NO: 8132 - DNA, 53 bp, Artificial Sequence; identical to SEQ ID NO: 6839
  Description of Artificial Sequence: Synthetic primer
  Description of Combined DNA/RNA Molecule: Synthetic primer

SEQ ID NO: 8133 - DNA, 50 bp, Artificial Sequence; identical to SEQ ID NO: 6840
  Description of Artificial Sequence: Synthetic oligonucleotide
  Description of Combined DNA/RNA Molecule: Synthetic oligonucleotide

SEQ ID NO: 8134 - DNA, 41 bp, Artificial Sequence; identical to SEQ ID NO: 6841
  Description of Artificial Sequence: Synthetic oligonucleotide

SEQ ID NO: 8135 - DNA, 19 bp, Artificial Sequence
  Description of Artificial Sequence: Synthetic probe
aagagcgcagggcctggag

SEQ ID NO: 8136 - DNA, 21 bp, Artificial Sequence
  Description of Artificial Sequence: Synthetic primer
tcacagagacttgccgatcac

SEQ ID NO: 8137 - DNA, 22 bp, Artificial Sequence
  Description of Artificial Sequence: Synthetic primer
tggccatgtctaagctacacac

SEQ ID NO: 8138 - DNA, 46 bp, Artificial Sequence; identical to SEQ ID NO: 6845
  Description of Artificial Sequence: Synthetic primer
  Description of Combined DNA/RNA Molecule: Synthetic primer

SEQ ID NO: 8139 - DNA, 36 bp, Artificial Sequence; identical to SEQ ID NO: 5531
  Description of Artificial Sequence: Synthetic primer
  Description of Combined DNA/RNA Molecule: Synthetic primer

SEQ ID NO: 8140 - DNA, 37 bp, Artificial Sequence; identical to SEQ ID NO: 6928
  Description of Artificial Sequence: Synthetic primer
  Description of Combined DNA/RNA Molecule: Synthetic primer

SEQ ID NO: 8141 - DNA, 58 bp, Artificial Sequence; identical to SEQ ID NO: 6929
  Description of Artificial Sequence: Synthetic primer
  Description of Combined DNA/RNA Molecule: Synthetic primer

SEQ ID NO: 8142 - DNA, 53 bp, Artificial Sequence; identical to SEQ ID NO: 6930
  Description of Artificial Sequence: Synthetic oligonucleotide
  Description of Combined DNA/RNA Molecule: Synthetic oligonucleotide

SEQ ID NO: 8143 - DNA, 42 bp, Artificial Sequence; identical to SEQ ID NO: 6931
  Description of Artificial Sequence: Synthetic oligonucleotide

SEQ ID NO: 8144 - DNA, 22 bp, Artificial Sequence
  Description of Artificial Sequence: Synthetic probe
ttcaagccagccccaagccacc

SEQ ID NO: 8145 - DNA, 22 bp, Artificial Sequence
  Description of Artificial Sequence: Synthetic primer
tgatgctggcaaaccctagaac

SEQ ID NO: 8146 - DNA, 20 bp, Artificial Sequence
  Description of Artificial Sequence: Synthetic primer
tggcctaacggtgatggaac

SEQ ID NO: 8147 - DNA, 44 bp, Artificial Sequence; identical to SEQ ID NO: 6935
  Description of Artificial Sequence: Synthetic primer
  Description of Combined DNA/RNA Molecule: Synthetic primer

SEQ ID NO: 8148 - DNA, 42 bp, Artificial Sequence; identical to SEQ ID NO: 7431
  Description of Artificial Sequence: Synthetic primer
  Description of Combined DNA/RNA Molecule: Synthetic primer

SEQ ID NO: 8149 - DNA, 38 bp, Artificial Sequence; identical to SEQ ID NO: 7432
  Description of Artificial Sequence: Synthetic primer
  Description of Combined DNA/RNA Molecule: Synthetic primer

SEQ ID NO: 8150 - DNA, 53 bp, Artificial Sequence; identical to SEQ ID NO: 7433
  Description of Artificial Sequence: Synthetic primer
  Description of Combined DNA/RNA Molecule: Synthetic primer

SEQ ID NO: 8151 - DNA, 51 bp, Artificial Sequence; identical to SEQ ID NO: 7434
  Description of Artificial Sequence: Synthetic oligonucleotide
  Description of Combined DNA/RNA Molecule: Synthetic oligonucleotide

SEQ ID NO: 8152 - DNA, 46 bp, Artificial Sequence; identical to SEQ ID NO: 7435
  Description of Artificial Sequence: Synthetic oligonucleotide

SEQ ID NO: 8153 - DNA, 31 bp, Artificial Sequence; identical to SEQ ID NO: 7436
  Description of Artificial Sequence: Synthetic probe

SEQ ID NO: 8154 - DNA, 22 bp, Artificial Sequence
  Description of Artificial Sequence: Synthetic primer
tggcgtaaggacactctgaaac

SEQ ID NO: 8155 - DNA, 19 bp, Artificial Sequence
  Description of Artificial Sequence: Synthetic primer
tggtccgcacagaggaaac

SEQ ID NO: 8156 - DNA, 47 bp, Artificial Sequence; identical to SEQ ID NO: 7439
  Description of Artificial Sequence: Synthetic primer
  Description of Combined DNA/RNA Molecule: Synthetic primer

SEQ ID NO: 8157 - DNA, 40 bp, Artificial Sequence; identical to SEQ ID NO: 7440
  Description of Artificial Sequence: Synthetic primer
  Description of Combined DNA/RNA Molecule: Synthetic primer

SEQ ID NO: 8158 - DNA, 41 bp, Artificial Sequence; identical to SEQ ID NO: 7441
  Description of Artificial Sequence: Synthetic primer
  Description of Combined DNA/RNA Molecule: Synthetic primer

SEQ ID NO: 8159 - DNA, 49 bp, Artificial Sequence; identical to SEQ ID NO: 7442
  Description of Artificial Sequence: Synthetic primer
  Description of Combined DNA/RNA Molecule: Synthetic primer

SEQ ID NO: 8160 - DNA, 45 bp, Artificial Sequence; identical to SEQ ID NO: 7443
  Description of Artificial Sequence: Synthetic oligonucleotide
  Description of Combined DNA/RNA Molecule: Synthetic oligonucleotide

SEQ ID NO: 8161 - DNA, 46 bp, Artificial Sequence; identical to SEQ ID NO: 7444
  Description of Artificial Sequence: Synthetic oligonucleotide

SEQ ID NO: 8162 - DNA, 27 bp, Artificial Sequence
  Description of Artificial Sequence: Synthetic probe
tttccttcacagctccacaccagcaag

SEQ ID NO: 8163 - DNA, 21 bp, Artificial Sequence
  Description of Artificial Sequence: Synthetic primer
tcacgcacgtagggtctaaac

SEQ ID NO: 8164 - DNA, 20 bp, Artificial Sequence
  Description of Artificial Sequence: Synthetic primer
tgtaaccacagccggacaac

SEQ ID NO: 8165 - DNA, 44 bp, Artificial Sequence; identical to SEQ ID NO: 7448
  Description of Artificial Sequence: Synthetic primer
  Description of Combined DNA/RNA Molecule: Synthetic primer

SEQ ID NO: 8166 - DNA, 41 bp, Artificial Sequence
  Description of Artificial Sequence: Synthetic primer
  Description of Combined DNA/RNA Molecule: Synthetic primer
acgacgacgacgaagtcagggccacttgggatcacagctcc

SEQ ID NO: 8167 - DNA, 39 bp, Artificial Sequence
  Description of Artificial Sequence: Synthetic primer
  Description of Combined DNA/RNA Molecule: Synthetic primer
acgacgacgacgaagcagtcagggccacttgggaucacg

SEQ ID NO: 8168 - DNA, 50 bp, Artificial Sequence
  Description of Artificial Sequence: Synthetic primer
  Description of Combined DNA/RNA Molecule: Synthetic primer
acgacgacgacttgacgaacataatgttggtcagtgctgtgaggcgcaga

SEQ ID NO: 8169 - DNA, 51 bp, Artificial Sequence
  Description of Artificial Sequence: Synthetic oligonucleotide
  Description of Combined DNA/RNA Molecule: Synthetic oligonucleotide
tggataaactaagtccgcccacgctctgaagggcttcatcacaacactcga

SEQ ID NO: 8170 - DNA, 54 bp, Artificial Sequence
  Description of Artificial Sequence: Synthetic oligonucleotide
ctcagaaatctccctcaggatggcatccacttcgtgactgagcgacgtctaaca

SEQ ID NO: 8171 - DNA, 34 bp, Artificial Sequence
  Description of Artificial Sequence: Synthetic probe
cccacaacactcagaaatctccctcaggatggca

SEQ ID NO: 8172 - DNA, 22 bp, Artificial Sequence
  Description of Artificial Sequence: Synthetic primer
tggataaactaagtccgcccac

SEQ ID NO: 8173 - DNA, 21 bp, Artificial Sequence
  Description of Artificial Sequence: Synthetic primer
tgttagacgtcgctcagtcac

SEQ ID NO: 8174 - DNA, 47 bp, Artificial Sequence
  Description of Artificial Sequence: Synthetic primer
  Description of Combined DNA/RNA Molecule: Synthetic primer
tgttagacgtcgctcagtcactgctgtgaggcaggattgtatggaaa

SEQ ID NO: 8175 - DNA, 38 bp, Artificial Sequence
  Description of Artificial Sequence: Synthetic primer
  Description of Combined DNA/RNA Molecule: Synthetic primer
acgacgacgacgaacccagtcccccaaaccccaagcta

SEQ ID NO: 8176 - DNA, 39 bp, Artificial Sequence
  Description of Artificial Sequence: Synthetic primer
  Description of Combined DNA/RNA Molecule: Synthetic primer
acgacgacgacgaacagtcccccaaaccccaagcugcat

SEQ ID NO: 8177 - DNA, 57 bp, Artificial Sequence
  Description of Artificial Sequence: Synthetic primer
  Description of Combined DNA/RNA Molecule: Synthetic primer
acgacgacgacttgacgaacataatcctgagatagtggttgtaggtggtggcuggac

SEQ ID NO: 8178 - DNA, 43 bp, Artificial Sequence
  Description of Artificial Sequence: Synthetic oligonucleotide
  Description of Combined DNA/RNA Molecule: Synthetic oligonucleotide
tcctgaattggccacaccacacctggaggcacccaacacattg

SEQ ID NO: 8179 - DNA, 46 bp, Artificial Sequence
  Description of Artificial Sequence: Synthetic oligonucleotide
catcagagccactgcaccaccacccgtgactgagcgacgtctaaca

SEQ ID NO: 8180 - DNA, 26 bp, Artificial Sequence
  Description of Artificial Sequence: Synthetic probe
ttcccaacacatcagagccactgcac

SEQ ID NO: 8181 - DNA, 20 bp, Artificial Sequence
  Description of Artificial Sequence: Synthetic primer
tcctgaattggccacaccac

SEQ ID NO: 8182 - DNA, 21 bp, Artificial Sequence
  Description of Artificial Sequence: Synthetic primer
tgttagacgtcgctcagtcac

SEQ ID NO: 8183 - DNA, 50 bp, Artificial Sequence
  Description of Artificial Sequence: Synthetic primer
  Description of Combined DNA/RNA Molecule: Synthetic primer
tgttagacgtcgctcagtcacagatagtggttgtaggtggtggttggatg

SEQ ID NO: 8184 - DNA, 40 bp, Artificial Sequence
  Description of Artificial Sequence: Synthetic primer
  Description of Combined DNA/RNA Molecule: Synthetic primer
acgacgacgacgaactaggcaggagtgggaccccaggccg

SEQ ID NO: 8185 - DNA, 42 bp, Artificial Sequence
  Description of Artificial Sequence: Synthetic primer
  Description of Combined DNA/RNA Molecule: Synthetic primer
acgacgacgacgaatctcctcctagcactaggcaggagtgga

SEQ ID NO: 8186 - DNA, 56 bp, Artificial Sequence
  Description of Artificial Sequence: Synthetic primer
  Description of Combined DNA/RNA Molecule: Synthetic primer
acgacgacgacttgacgaacataatcctccctttgtgacaaatgtgcagcautaga

SEQ ID NO: 8187 - DNA, 49 bp, Artificial Sequence
  Description of Artificial Sequence: Synthetic oligonucleotide
  Description of Combined DNA/RNA Molecule: Synthetic oligonucleotide
ttcttgcggttctggaacacagcaagagtcaccaggtgagggcaggctt

SEQ ID NO: 8188 - DNA, 42 bp, Artificial Sequence
  Description of Artificial Sequence: Synthetic oligonucleotide
ggcccagcccatggcacctaggtgatgctccgttgttgctaa

SEQ ID NO: 8189 - DNA, 19 bp, Artificial Sequence
  Description of Artificial Sequence: Synthetic probe
aagagggcaggcccagccc

SEQ ID NO: 8190 - DNA, 20 bp, Artificial Sequence
  Description of Artificial Sequence: Synthetic primer
ttcttgcggttctggaacac

SEQ ID NO: 8191 - DNA, 21 bp, Artificial Sequence
  Description of Artificial Sequence: Synthetic primer
ttagcaacaacggagcatcac

SEQ ID NO: 8192 - DNA, 53 bp, Artificial Sequence
  Description of Artificial Sequence: Synthetic primer
  Description of Combined DNA/RNA Molecule: Synthetic primer
ttagcaacaacggagcatcaccagcattagggccctttacagctagatgccac

SEQ ID NO: 8193 - DNA, 39 bp, Artificial Sequence
  Description of Artificial Sequence: Synthetic primer
  Description of Combined DNA/RNA Molecule: Synthetic primer
acgacgacgacgaacagccaccaccactgggtcactgct

SEQ ID NO: 8194 - DNA, 40 bp, Artificial Sequence
  Description of Artificial Sequence: Synthetic primer
  Description of Combined DNA/RNA Molecule: Synthetic primer
acgacgacgacgaacaccaccactgggtcactgccuggct

SEQ ID NO: 8195 - DNA, 56 bp, Artificial Sequence
  Description of Artificial Sequence: Synthetic primer
  Description of Combined DNA/RNA Molecule: Synthetic primer
acgacgacgacttgacgaacataatgacactgatggatgtgccaatggttggatga

SEQ ID NO: 8196 - DNA, 45 bp, Artificial Sequence
  Description of Artificial Sequence: Synthetic oligonucleotide
  Description of Combined DNA/RNA Molecule: Synthetic oligonucleotide
tatggtaaaatgtcagcggcacccctcccccactcagacaccaga

SEQ ID NO: 8197 - DNA, 53 bp, Artificial Sequence
  Description of Artificial Sequence: Synthetic oligonucleotide
ccaagcactgtgcaatccaccctaacatctgtgtgatgctccgttgttgctaa

SEQ ID NO: 8198 - DNA, 29 bp, Artificial Sequence
  Description of Artificial Sequence: Synthetic probe
tttcagacaccaagcactgtgcaatccac

SEQ ID NO: 8199 - DNA, 22 bp, Artificial Sequence
  Description of Artificial Sequence: Synthetic primer
tatggtaaaatgtcagcggcac

SEQ ID NO: 8200 - DNA, 21 bp, Artificial Sequence
  Description of Artificial Sequence: Synthetic primer
ttagcaacaacggagcatcac

SEQ ID NO: 8201 - DNA, 51 bp, Artificial Sequence
  Description of Artificial Sequence: Synthetic primer
  Description of Combined DNA/RNA Molecule: Synthetic primer
ttagcaacaacggagcatcacctgatggatgtgccaatggttgggtggacg

SEQ ID NO: 8202 - DNA, 41 bp, Artificial Sequence
  Description of Artificial Sequence: Synthetic primer
  Description of Combined DNA/RNA Molecule: Synthetic primer
acgacgacgacgaaccagagcaacagcactctcccaaccaa

SEQ ID NO: 8203 - DNA, 42 bp, Artificial Sequence
  Description of Artificial Sequence: Synthetic primer
  Description of Combined DNA/RNA Molecule: Synthetic primer
acgacgacgacgaagagcaacagcactctcccaaccagtgaa

SEQ ID NO: 8204 - DNA, 67 bp, Artificial Sequence
  Description of Artificial Sequence: Synthetic primer
  Description of Combined DNA/RNA Molecule: Synthetic primer
acgacgacgacttgacgaacataatttaatgagaggagtttgattgatagatcatatggtgcutgcg

SEQ ID NO: 8205 - DNA, 47 bp, Artificial Sequence
  Description of Artificial Sequence: Synthetic oligonucleotide
  Description of Combined DNA/RNA Molecule: Synthetic oligonucleotide
ttgtgcagagcgaacaacaagggacagattgcagccaagacagcagc

SEQ ID NO: 8206 - DNA, 51 bp, Artificial Sequence
  Description of Artificial Sequence: Synthetic oligonucleotide
gcaatatcagggtcagactcaccctgctgcttgctatttggtgtaccgcca

SEQ ID NO: 8207 - DNA, 32 bp, Artificial Sequence
  Description of Artificial Sequence: Synthetic probe
ttcaagacagcaatatcagggtcagactcacc

SEQ ID NO: 8208 - DNA, 20 bp, Artificial Sequence
  Description of Artificial Sequence: Synthetic primer
ttgtgcagagcgaacaacaa

SEQ ID NO: 8209 - DNA, 21 bp, Artificial Sequence
  Description of Artificial Sequence: Synthetic primer
tggcggtacaccaaatagcaa

SEQ ID NO: 8210 - DNA, 60 bp, Artificial Sequence
  Description of Artificial Sequence: Synthetic primer
  Description of Combined DNA/RNA Molecule: Synthetic primer
tggcggtacaccaaatagcaagagaggagtttgattgatagatcatatggtgcctgcagt

SEQ ID NO: 8211 - DNA, 41 bp, Artificial Sequence
  Description of Artificial Sequence: Synthetic primer
  Description of Combined DNA/RNA Molecule: Synthetic primer
acgacgacgacgaagtgagagtggactgggttgccaugccg

SEQ ID NO: 8212 - DNA, 43 bp, Artificial Sequence
  Description of Artificial Sequence: Synthetic primer
  Description of Combined DNA/RNA Molecule: Synthetic primer
acgacgacgacgaattgctttcccactccagcaagtgagagta

SEQ ID NO: 8213 - DNA, 57 bp, Artificial Sequence
  Description of Artificial Sequence: Synthetic primer
  Description of Combined DNA/RNA Molecule: Synthetic primer
acgacgacgacttgacgaacataatcttgccatgagacagaaaatgctgggagctga

SEQ ID NO: 8214 - DNA, 47 bp, Artificial Sequence
  Description of Artificial Sequence: Synthetic oligonucleotide
  Description of Combined DNA/RNA Molecule: Synthetic oligonucleotide
tccaaacgattaggagcgtcaacaggcaggtgtgggtcatcaggcgg

SEQ ID NO: 8215 - DNA, 47 bp, Artificial Sequence
  Description of Artificial Sequence: Synthetic oligonucleotide
ggcaactccagagtctccccttccccttggacagaggtatacgccca

SEQ ID NO: 8216 - DNA, 29 bp, Artificial Sequence
  Description of Artificial Sequence: Synthetic probe
ttgtcatcaggcaactccagagtctcccc

SEQ ID NO: 8217 - DNA, 22 bp, Artificial Sequence
  Description of Artificial Sequence: Synthetic primer
tccaaacgattaggagcgtcaa

SEQ ID NO: 8218 - DNA, 21 bp, Artificial Sequence
  Description of Artificial Sequence: Synthetic primer
tgggcgtatacctctgtccaa

SEQ ID NO: 8219 - DNA, 45 bp, Artificial Sequence
  Description of Artificial Sequence: Synthetic primer
  Description of Combined DNA/RNA Molecule: Synthetic primer
tgggcgtatacctctgtccaagggacttctgctgagggctgatga

SEQ ID NO: 8220 - DNA, 39 bp, Artificial Sequence
  Description of Artificial Sequence: Synthetic primer
  Description of Combined DNA/RNA Molecule: Synthetic primer
acgacgacgacgaacccagggccacattcctccaaggtt

SEQ ID NO: 8221 - DNA, 41 bp, Artificial Sequence
  Description of Artificial Sequence: Synthetic primer
  Description of Combined DNA/RNA Molecule: Synthetic primer
acgacgacgacgaaagggccacattcctccaaggtcugcag

SEQ ID NO: 8222 - DNA, 54 bp, Artificial Sequence
  Description of Artificial Sequence: Synthetic primer
  Description of Combined DNA/RNA Molecule: Synthetic primer
acgacgacgacttgacgaacataatgtgctatcagctgtttcctgaggcuctcc

SEQ ID NO: 8223 - DNA, 46 bp, Artificial Sequence
  Description of Artificial Sequence: Synthetic oligonucleotide
  Description of Combined DNA/RNA Molecule: Synthetic oligonucleotide
ttgcagcgggtcacaacaacacagaggagcagctgggagcaagagt

SEQ ID NO: 8224 - DNA, 44 bp, Artificial Sequence
  Description of Artificial Sequence: Synthetic oligonucleotide
agaacaaagcagccaggccccccttggacagaggtatacgccca

SEQ ID NO: 8225 - DNA, 26 bp, Artificial Sequence
  Description of Artificial Sequence: Synthetic probe
aagggagcaagaacaaagcagccagg

SEQ ID NO: 8226 - DNA, 19 bp, Artificial Sequence
  Description of Artificial Sequence: Synthetic primer
ttgcagcgggtcacaacaa

SEQ ID NO: 8227 - DNA, 21 bp, Artificial Sequence
  Description of Artificial Sequence: Synthetic primer
tgggcgtatacctctgtccaa

SEQ ID NO: 8228 - DNA, 49 bp, Artificial Sequence
  Description of Artificial Sequence: Synthetic primer
  Description of Combined DNA/RNA Molecule: Synthetic primer
tgggcgtatacctctgtccaagaggctctctccttccttcctttgagga

SEQ ID NO: 8229 - DNA, 38 bp, Artificial Sequence
  Description of Artificial Sequence: Synthetic primer
  Description of Combined DNA/RNA Molecule: Synthetic primer
acgacgacgacgaacaggtggctgccagacccaggaac

SEQ ID NO: 8230 - DNA, 39 bp, Artificial Sequence
  Description of Artificial Sequence: Synthetic primer
  Description of Combined DNA/RNA Molecule: Synthetic primer
acgacgacgacgaagtggctgccagacccaggaauagaa

SEQ ID NO: 8231 - DNA, 48 bp, Artificial Sequence
  Description of Artificial Sequence: Synthetic primer
  Description of Combined DNA/RNA Molecule: Synthetic primer
acgacgacgacttgacgaacataatcctgccctgccctgcctccgggc

SEQ ID NO: 8232 - DNA, 52 bp, Artificial Sequence
  Description of Artificial Sequence: Synthetic oligonucleotide
  Description of Combined DNA/RNA Molecule: Synthetic oligonucleotide
tcgtcccggtcagtagtcaagccaggtgttttatagcagggtttacaucatg

SEQ ID NO: 8233 - DNA, 44 bp, Artificial Sequence
  Description of Artificial Sequence: Synthetic oligonucleotide
tcacacagctgggcaggcatctgcttgcccattttctgcaccca

SEQ ID NO: 8234 - DNA, 28 bp, Artificial Sequence
  Description of Artificial Sequence: Synthetic probe
ttgtttacatcacacagctgggcaggca

SEQ ID NO: 8235 - DNA, 20 bp, Artificial Sequence
  Description of Artificial Sequence: Synthetic primer
tcgtcccggtcagtagtcaa

SEQ ID NO: 8236 - DNA, 20 bp, Artificial Sequence
  Description of Artificial Sequence: Synthetic primer
tgggtgcagaaaatgggcaa

SEQ ID NO: 8237 - DNA, 47 bp, Artificial Sequence
  Description of Artificial Sequence: Synthetic primer
  Description of Combined DNA/RNA Molecule: Synthetic primer
tgggtgcagaaaatgggcaagaagcctttctgagctgggagtgcagg

SEQ ID NO: 8238 - DNA, 38 bp, Artificial Sequence; identical to SEQ ID NO: 839
  Description of Artificial Sequence: Synthetic primer
  Description of Combined DNA/RNA Molecule: Synthetic primer

SEQ ID NO: 8239 - DNA, 51 bp, Artificial Sequence; identical to SEQ ID NO: 840
  Description of Artificial Sequence: Synthetic primer
  Description of Combined DNA/RNA Molecule: Synthetic primer

SEQ ID NO: 8240 - DNA, 50 bp, Artificial Sequence; identical to SEQ ID NO: 841
  Description of Artificial Sequence: Synthetic oligonucleotide
  Description of Combined DNA/RNA Molecule: Synthetic oligonucleotide

SEQ ID NO: 8241 - DNA, 58 bp, Artificial Sequence; identical to SEQ ID NO: 842
  Description of Artificial Sequence: Synthetic oligonucleotide

SEQ ID NO: 8242 - DNA, 31 bp, Artificial Sequence; identical to SEQ ID NO: 843
  Description of Artificial Sequence: Synthetic probe

SEQ ID NO: 8243 - DNA, 19 bp, Artificial Sequence
  Description of Artificial Sequence: Synthetic primer
ttgcaaaccacccggacaa

SEQ ID NO: 8244 - DNA, 20 bp, Artificial Sequence
  Description of Artificial Sequence: Synthetic primer
taggagtcgatgctgaccaa

SEQ ID NO: 8245 - DNA, 50 bp, Artificial Sequence; identical to SEQ ID NO: 846
  Description of Artificial Sequence: Synthetic primer
  Description of Combined DNA/RNA Molecule: Synthetic primer

SEQ ID NO: 8246 - DNA, 38 bp, Artificial Sequence; identical to SEQ ID NO: 847
  Description of Artificial Sequence: Synthetic primer
  Description of Combined DNA/RNA Molecule: Synthetic primer

SEQ ID NO: 8247 - DNA, 39 bp, Artificial Sequence; identical to SEQ ID NO: 848
  Description of Artificial Sequence: Synthetic primer
  Description of Combined DNA/RNA Molecule: Synthetic primer

SEQ ID NO: 8248 - DNA, 51 bp, Artificial Sequence; identical to SEQ ID NO: 849
  Description of Artificial Sequence: Synthetic primer
  Description of Combined DNA/RNA Molecule: Synthetic primer

SEQ ID NO: 8249 - DNA, 40 bp, Artificial Sequence; identical to SEQ ID NO: 850
  Description of Artificial Sequence: Synthetic oligonucleotide
  Description of Combined DNA/RNA Molecule: Synthetic oligonucleotide

SEQ ID NO: 8250 - DNA, 50 bp, Artificial Sequence; identical to SEQ ID NO: 851
  Description of Artificial Sequence: Synthetic oligonucleotide

SEQ ID NO: 8251 - DNA, 28 bp, Artificial Sequence
  Description of Artificial Sequence: Synthetic probe
aacccaacacatagcagccaacactcag

SEQ ID NO: 8252 - DNA, 19 bp, Artificial Sequence
  Description of Artificial Sequence: Synthetic primer
ttgcaaaccacccggacaa

SEQ ID NO: 8253 - DNA, 20 bp, Artificial Sequence
  Description of Artificial Sequence: Synthetic primer
taggagtcgatgctgaccaa

SEQ ID NO: 8254 - DNA, 45 bp, Artificial Sequence; identical to SEQ ID NO: 855
  Description of Artificial Sequence: Synthetic primer
  Description of Combined DNA/RNA Molecule: Synthetic primer

SEQ ID NO: 8255 - DNA, 41 bp, Artificial Sequence; identical to SEQ ID NO: 856
  Description of Artificial Sequence: Synthetic primer
  Description of Combined DNA/RNA Molecule: Synthetic primer

SEQ ID NO: 8256 - DNA, 41 bp, Artificial Sequence; identical to SEQ ID NO: 857
  Description of Artificial Sequence: Synthetic primer
  Description of Combined DNA/RNA Molecule: Synthetic primer

SEQ ID NO: 8257 - DNA, 48 bp, Artificial Sequence; identical to SEQ ID NO: 858
  Description of Artificial Sequence: Synthetic primer
  Description of Combined DNA/RNA Molecule: Synthetic primer

SEQ ID NO: 8258 - DNA, 48 bp, Artificial Sequence; identical to SEQ ID NO: 859
  Description of Artificial Sequence: Synthetic oligonucleotide
  Description of Combined DNA/RNA Molecule: Synthetic oligonucleotide

SEQ ID NO: 8259 - DNA, 49 bp, Artificial Sequence; identical to SEQ ID NO: 860
  Description of Artificial Sequence: Synthetic oligonucleotide

SEQ ID NO: 8260 - DNA, 25 bp, Artificial Sequence
  Description of Artificial Sequence: Synthetic probe
ttgggaacaggtgtgtgagtgcagc

SEQ ID NO: 8261 - DNA, 21 bp, Artificial Sequence
  Description of Artificial Sequence: Synthetic primer
taagacgtatgctagcgccaa

SEQ ID NO: 8262 - DNA, 20 bp, Artificial Sequence
  Description of Artificial Sequence: Synthetic primer
taggagtcgatgctgaccaa

SEQ ID NO: 8263 - DNA, 51 bp, Artificial Sequence; identical to SEQ ID NO: 864
  Description of Artificial Sequence: Synthetic primer
  Description of Combined DNA/RNA Molecule: Synthetic primer

SEQ ID NO: 8264 - DNA, 36 bp, Artificial Sequence; identical to SEQ ID NO: 865
  Description of Artificial Sequence: Synthetic primer
  Description of Combined DNA/RNA Molecule: Synthetic primer

SEQ ID NO: 8265 - DNA, 41 bp, Artificial Sequence; identical to SEQ ID NO: 866
  Description of Artificial Sequence: Synthetic primer
  Description of Combined DNA/RNA Molecule: Synthetic primer

SEQ ID NO: 8266 - DNA, 55 bp, Artificial Sequence; identical to SEQ ID NO: 867
  Description of Artificial Sequence: Synthetic primer
  Description of Combined DNA/RNA Molecule: Synthetic primer

SEQ ID NO: 8267 - DNA, 46 bp, Artificial Sequence; identical to SEQ ID NO: 868
  Description of Artificial Sequence: Synthetic oligonucleotide
  Description of Combined DNA/RNA Molecule: Synthetic oligonucleotide

SEQ ID NO: 8268 - DNA, 42 bp, Artificial Sequence; identical to SEQ ID NO: 869
  Description of Artificial Sequence: Synthetic oligonucleotide

SEQ ID NO: 8269 - DNA, 25 bp, Artificial Sequence
  Description of Artificial Sequence: Synthetic probe
ttggcatcagcagggagctgctcag

SEQ ID NO: 8270 - DNA, 19 bp, Artificial Sequence
  Description of Artificial Sequence: Synthetic primer
tacatgccatcccacgaca

SEQ ID NO: 8271 - DNA, 19 bp, Artificial Sequence
  Description of Artificial Sequence: Synthetic primer
tagtaaccgctccgacaca

SEQ ID NO: 8272 - DNA, 49 bp, Artificial Sequence; identical to SEQ ID NO: 873
  Description of Artificial Sequence: Synthetic primer
  Description of Combined DNA/RNA Molecule: Synthetic primer

SEQ ID NO: 8273 - DNA, 44 bp, Artificial Sequence; identical to SEQ ID NO: 906
  Description of Artificial Sequence: Synthetic primer
  Description of Combined DNA/RNA Molecule: Synthetic primer

SEQ ID NO: 8274 - DNA, 44 bp, Artificial Sequence; identical to SEQ ID NO: 907
  Description of Artificial Sequence: Synthetic primer
  Description of Combined DNA/RNA Molecule: Synthetic primer

SEQ ID NO: 8275 - DNA, 49 bp, Artificial Sequence; identical to SEQ ID NO: 908
  Description of Artificial Sequence: Synthetic primer
  Description of Combined DNA/RNA Molecule: Synthetic primer

SEQ ID NO: 8276 - DNA, 49 bp, Artificial Sequence; identical to SEQ ID NO: 909
  Description of Artificial Sequence: Synthetic oligonucleotide
  Description of Combined DNA/RNA Molecule: Synthetic oligonucleotide

SEQ ID NO: 8277 - DNA, 47 bp, Artificial Sequence; identical to SEQ ID NO: 910
  Description of Artificial Sequence: Synthetic oligonucleotide

SEQ ID NO: 8278 - DNA, 29 bp, Artificial Sequence
  Description of Artificial Sequence: Synthetic probe
ttcagaacacacccaatctccagcaggag

SEQ ID NO: 8279 - DNA, 22 bp, Artificial Sequence
  Description of Artificial Sequence: Synthetic primer
taaacaatgagacccgctgaac

SEQ ID NO: 8280 - DNA, 22 bp, Artificial Sequence
  Description of Artificial Sequence: Synthetic primer
tatgaactgcctatgcgacaac

SEQ ID NO: 8281 - DNA, 44 bp, Artificial Sequence; identical to SEQ ID NO: 914
  Description of Artificial Sequence: Synthetic primer
  Description of Combined DNA/RNA Molecule: Synthetic primer

SEQ ID NO: 8282 - DNA, 43 bp, Artificial Sequence; identical to SEQ ID NO: 933
  Description of Artificial Sequence: Synthetic primer
  Description of Combined DNA/RNA Molecule: Synthetic primer

SEQ ID NO: 8283 - DNA, 46 bp, Artificial Sequence; identical to SEQ ID NO: 934
  Description of Artificial Sequence: Synthetic primer
  Description of Combined DNA/RNA Molecule: Synthetic primer

SEQ ID NO: 8284 - DNA, 56 bp, Artificial Sequence; identical to SEQ ID NO: 935
  Description of Artificial Sequence: Synthetic primer
  Description of Combined DNA/RNA Molecule: Synthetic primer

SEQ ID NO: 8285 - DNA, 45 bp, Artificial Sequence; identical to SEQ ID NO: 936
  Description of Artificial Sequence: Synthetic oligonucleotide
  Description of Combined DNA/RNA Molecule: Synthetic oligonucleotide

SEQ ID NO: 8286 - DNA, 47 bp, Artificial Sequence; identical to SEQ ID NO: 937
  Description of Artificial Sequence: Synthetic oligonucleotide

SEQ ID NO: 8287 - DNA, 24 bp, Artificial Sequence
  Description of Artificial Sequence: Synthetic probe
ttgccaacaggcctgtgatcccag

SEQ ID NO: 8288 - DNA, 21 bp, Artificial Sequence
  Description of Artificial Sequence: Synthetic primer
ttctagataccacggacgcac

SEQ ID NO: 8289 - DNA, 20 bp, Artificial Sequence
  Description of Artificial Sequence: Synthetic primer
tcagctttgcacaccaacac

SEQ ID NO: 8290 - DNA, 46 bp, Artificial Sequence; identical to SEQ ID NO: 941
  Description of Artificial Sequence: Synthetic primer
  Description of Combined DNA/RNA Molecule: Synthetic primer

SEQ ID NO: 8291 - DNA, 38 bp, Artificial Sequence; identical to SEQ ID NO: 1208
  Description of Artificial Sequence: Synthetic primer
  Description of Combined DNA/RNA Molecule: Synthetic primer

SEQ ID NO: 8292 - DNA, 54 bp, Artificial Sequence; identical to SEQ ID NO: 1209
  Description of Artificial Sequence: Synthetic primer
  Description of Combined DNA/RNA Molecule: Synthetic primer

SEQ ID NO: 8293 - DNA, 49 bp, Artificial Sequence; identical to SEQ ID NO: 1210
  Description of Artificial Sequence: Synthetic oligonucleotide
  Description of Combined DNA/RNA Molecule: Synthetic oligonucleotide

SEQ ID NO: 8294 - DNA, 42 bp, Artificial Sequence; identical to SEQ ID NO: 1211
  Description of Artificial Sequence: Synthetic oligonucleotide

SEQ ID NO: 8295 - DNA, 24 bp, Artificial Sequence
  Description of Artificial Sequence: Synthetic probe
ttggacgcagaaccaggtgaggag

SEQ ID NO: 8296 - DNA, 19 bp, Artificial Sequence
  Description of Artificial Sequence: Synthetic primer
ttcagcagcctggcatcac

SEQ ID NO: 8297 - DNA, 19 bp, Artificial Sequence
  Description of Artificial Sequence: Synthetic primer
tgcaaccttagcgctccac

SEQ ID NO: 8298 - DNA, 48 bp, Artificial Sequence; identical to SEQ ID NO: 1215
  Description of Artificial Sequence: Synthetic primer
  Description of Combined DNA/RNA Molecule: Synthetic primer

SEQ ID NO: 8299 - DNA, 53 bp, Artificial Sequence; identical to SEQ ID NO: 1525
  Description of Artificial Sequence: Synthetic primer
  Description of Combined DNA/RNA Molecule: Synthetic primer

SEQ ID NO: 8300 - DNA, 51 bp, Artificial Sequence; identical to SEQ ID NO: 1526
  Description of Artificial Sequence: Synthetic primer
  Description of Combined DNA/RNA Molecule: Synthetic primer

SEQ ID NO: 8301 - DNA, 47 bp, Artificial Sequence; identical to SEQ ID NO: 1527
  Description of Artificial Sequence: Synthetic oligonucleotide
  Description of Combined DNA/RNA Molecule: Synthetic oligonucleotide

SEQ ID NO: 8302 - DNA, 46 bp, Artificial Sequence; identical to SEQ ID NO: 1528
  Description of Artificial Sequence: Synthetic oligonucleotide

SEQ ID NO: 8303 - DNA, 29 bp, Artificial Sequence
  Description of Artificial Sequence: Synthetic probe
ttatcatcacctctacagggagggagcca

SEQ ID NO: 8304 - DNA, 21 bp, Artificial Sequence
  Description of Artificial Sequence: Synthetic primer
tacacgtggatatctccgacc

SEQ ID NO: 8305 - DNA, 21 bp, Artificial Sequence
  Description of Artificial Sequence: Synthetic primer
tggaactgtgtgactagcacc

SEQ ID NO: 8306 - DNA, 44 bp, Artificial Sequence; identical to SEQ ID NO: 1532
  Description of Artificial Sequence: Synthetic primer
  Description of Combined DNA/RNA Molecule: Synthetic primer

SEQ ID NO: 8307 - DNA, 36 bp, Artificial Sequence; identical to SEQ ID NO: 1595
  Description of Artificial Sequence: Synthetic primer
  Description of Combined DNA/RNA Molecule: Synthetic primer

SEQ ID NO: 8308 - DNA, 39 bp, Artificial Sequence; identical to SEQ ID NO: 1596
  Description of Artificial Sequence: Synthetic primer
  Description of Combined DNA/RNA Molecule: Synthetic primer

SEQ ID NO: 8309 - DNA, 54 bp, Artificial Sequence; identical to SEQ ID NO: 1597
  Description of Artificial Sequence: Synthetic primer
  Description of Combined DNA/RNA Molecule: Synthetic primer

SEQ ID NO: 8310 - DNA, 45 bp, Artificial Sequence; identical to SEQ ID NO: 1598
  Description of Artificial Sequence: Synthetic oligonucleotide
  Description of Combined DNA/RNA Molecule: Synthetic oligonucleotide

SEQ ID NO: 8311 - DNA, 52 bp, Artificial Sequence; identical to SEQ ID NO: 1599
  Description of Artificial Sequence: Synthetic oligonucleotide

SEQ ID NO: 8312 - DNA, 33 bp, Artificial Sequence; identical to SEQ ID NO: 1600
  Description of Artificial Sequence: Synthetic probe

SEQ ID NO: 8313 - DNA, 21 bp, Artificial Sequence
  Description of Artificial Sequence: Synthetic primer
tcacagagacttgccgatcac

SEQ ID NO: 8314 - DNA, 22 bp, Artificial Sequence
  Description of Artificial Sequence: Synthetic primer
tggccatgtctaagctacacac

SEQ ID NO: 8315 - DNA, 44 bp, Artificial Sequence; identical to SEQ ID NO: 1603
  Description of Artificial Sequence: Synthetic primer
  Description of Combined DNA/RNA Molecule: Synthetic primer

SEQ ID NO: 8316 - DNA, 40 bp, Artificial Sequence; identical to SEQ ID NO: 1622
  Description of Artificial Sequence: Synthetic primer
  Description of Combined DNA/RNA Molecule: Synthetic primer

SEQ ID NO: 8317 - DNA, 62 bp, Artificial Sequence; identical to SEQ ID NO: 1623
  Description of Artificial Sequence: Synthetic primer
  Description of Combined DNA/RNA Molecule: Synthetic primer

SEQ ID NO: 8318 - DNA, 56 bp, Artificial Sequence; identical to SEQ ID NO: 1624
  Description of Artificial Sequence: Synthetic oligonucleotide
  Description of Combined DNA/RNA Molecule: Synthetic oligonucleotide

SEQ ID NO: 8319 - DNA, 57 bp, Artificial Sequence; identical to SEQ ID NO: 1625
  Description of Artificial Sequence: Synthetic oligonucleotide

SEQ ID NO: 8320 - DNA, 39 bp, Artificial Sequence; identical to SEQ ID NO: 1626
  Description of Artificial Sequence: Synthetic probe

SEQ ID NO: 8321 - DNA, 22 bp, Artificial Sequence
  Description of Artificial Sequence: Synthetic primer
tgatgctggcaaaccctagaac

SEQ ID NO: 8322 - DNA, 20 bp, Artificial Sequence
  Description of Artificial Sequence: Synthetic primer
tggcctaacggtgatggaac

SEQ ID NO: 8323 - DNA, 37 bp, Artificial Sequence; identical to SEQ ID NO: 1647
  Description of Artificial Sequence: Synthetic primer
  Description of Combined DNA/RNA Molecule: Synthetic primer

SEQ ID NO: 8324 - DNA, 42 bp, Artificial Sequence; identical to SEQ ID NO: 1648
  Description of Artificial Sequence: Synthetic primer
  Description of Combined DNA/RNA Molecule: Synthetic primer

SEQ ID NO: 8325 - DNA, 48 bp, Artificial Sequence; identical to SEQ ID NO: 1649
  Description of Artificial Sequence: Synthetic primer
  Description of Combined DNA/RNA Molecule: Synthetic primer

SEQ ID NO: 8326 - DNA, 48 bp, Artificial Sequence; identical to SEQ ID NO: 1650
  Description of Artificial Sequence: Synthetic oligonucleotide
  Description of Combined DNA/RNA Molecule: Synthetic oligonucleotide

SEQ ID NO: 8327 - DNA, 57 bp, Artificial Sequence; identical to SEQ ID NO: 1651
  Description of Artificial Sequence: Synthetic oligonucleotide

SEQ ID NO: 8328 - DNA, 36 bp, Artificial Sequence; identical to SEQ ID NO: 1652
  Description of Artificial Sequence: Synthetic probe

SEQ ID NO: 8329 - DNA, 20 bp, Artificial Sequence
  Description of Artificial Sequence: Synthetic primer
tccgggtatacactgtccca

SEQ ID NO: 8330 - DNA, 21 bp, Artificial Sequence
  Description of Artificial Sequence: Synthetic primer
tggcctgtcctctgttaacca

SEQ ID NO: 8331 - DNA, 46 bp, Artificial Sequence; identical to SEQ ID NO: 1655
  Description of Artificial Sequence: Synthetic primer
  Description of Combined DNA/RNA Molecule: Synthetic primer

SEQ ID NO: 8332 - DNA, 38 bp, Artificial Sequence; identical to SEQ ID NO: 1781
  Description of Artificial Sequence: Synthetic primer
  Description of Combined DNA/RNA Molecule: Synthetic primer

SEQ ID NO: 8333 - DNA, 38 bp, Artificial Sequence; identical to SEQ ID NO: 1782
  Description of Artificial Sequence: Synthetic primer
  Description of Combined DNA/RNA Molecule: Synthetic primer

SEQ ID NO: 8334 - DNA, 48 bp, Artificial Sequence; identical to SEQ ID NO: 1783
  Description of Artificial Sequence: Synthetic primer
  Description of Combined DNA/RNA Molecule: Synthetic primer

SEQ ID NO: 8335 - DNA, 43 bp, Artificial Sequence; identical to SEQ ID NO: 1784
  Description of Artificial Sequence: Synthetic oligonucleotide
  Description of Combined DNA/RNA Molecule: Synthetic oligonucleotide

SEQ ID NO: 8336 - DNA, 45 bp, Artificial Sequence; identical to SEQ ID NO: 1785
  Description of Artificial Sequence: Synthetic oligonucleotide

SEQ ID NO: 8337 - DNA, 24 bp, Artificial Sequence
  Description of Artificial Sequence: Synthetic probe
ttggcctcaacccttccccaccac

SEQ ID NO: 8338 - DNA, 20 bp, Artificial Sequence
  Description of Artificial Sequence: Synthetic primer
tatagtcacgcaggaccaca

SEQ ID NO: 8339 - DNA, 21 bp, Artificial Sequence
  Description of Artificial Sequence: Synthetic primer
tgtcatagacagccgcaaaca

SEQ ID NO: 8340 - DNA, 46 bp, Artificial Sequence; identical to SEQ ID NO: 1789
  Description of Artificial Sequence: Synthetic primer
  Description of Combined DNA/RNA Molecule: Synthetic primer

SEQ ID NO: 8341 - DNA, 45 bp, Artificial Sequence; identical to SEQ ID NO: 1799
  Description of Artificial Sequence: Synthetic primer
  Description of Combined DNA/RNA Molecule: Synthetic primer

SEQ ID NO: 8342 - DNA, 48 bp, Artificial Sequence; identical to SEQ ID NO: 1800
  Description of Artificial Sequence: Synthetic primer
  Description of Combined DNA/RNA Molecule: Synthetic primer

SEQ ID NO: 8343 - DNA, 55 bp, Artificial Sequence; identical to SEQ ID NO: 1801
  Description of Artificial Sequence: Synthetic primer
  Description of Combined DNA/RNA Molecule: Synthetic primer

SEQ ID NO: 8344 - DNA, 47 bp, Artificial Sequence; identical to SEQ ID NO: 1802
  Description of Artificial Sequence: Synthetic oligonucleotide
  Description of Combined DNA/RNA Molecule: Synthetic oligonucleotide

SEQ ID NO: 8345 - DNA, 49 bp, Artificial Sequence; identical to SEQ ID NO: 1803
  Description of Artificial Sequence: Synthetic oligonucleotide

SEQ ID NO: 8346 - DNA, 24 bp, Artificial Sequence
  Description of Artificial Sequence: Synthetic probe
ttggagacagccaggagaggcagc

SEQ ID NO: 8347 - DNA, 21 bp, Artificial Sequence
  Description of Artificial Sequence: Synthetic primer
taatctccagacctccgaacc

SEQ ID NO: 8348 - DNA, 22 bp, Artificial Sequence
  Description of Artificial Sequence: Synthetic primer
tgtcccgttcaatccttacacc

SEQ ID NO: 8349 - DNA, 48 bp, Artificial Sequence; identical to SEQ ID NO: 1807
  Description of Artificial Sequence: Synthetic primer
  Description of Combined DNA/RNA Molecule: Synthetic primer

SEQ ID NO: 8350 - DNA, 38 bp, Artificial Sequence; identical to SEQ ID NO: 1934
  Description of Artificial Sequence: Synthetic primer
  Description of Combined DNA/RNA Molecule: Synthetic primer

SEQ ID NO: 8351 - DNA, 40 bp, Artificial Sequence; identical to SEQ ID NO: 1935
  Description of Artificial Sequence: Synthetic primer
  Description of Combined DNA/RNA Molecule: Synthetic primer

SEQ ID NO: 8352 - DNA, 52 bp, Artificial Sequence; identical to SEQ ID NO: 1936
  Description of Artificial Sequence: Synthetic primer
  Description of Combined DNA/RNA Molecule: Synthetic primer

SEQ ID NO: 8353 - DNA, 53 bp, Artificial Sequence; identical to SEQ ID NO: 1937
  Description of Artificial Sequence: Synthetic oligonucleotide
  Description of Combined DNA/RNA Molecule: Synthetic oligonucleotide

SEQ ID NO: 8354 - DNA, 49 bp, Artificial Sequence; identical to SEQ ID NO: 1938
  Description of Artificial Sequence: Synthetic oligonucleotide

SEQ ID NO: 8355 - DNA, 29 bp, Artificial Sequence
  Description of Artificial Sequence: Synthetic probe
cctttcgcatggtggaatcctccacatct

SEQ ID NO: 8356 - DNA, 19 bp, Artificial Sequence
  Description of Artificial Sequence: Synthetic primer
tcctcgagccgatgacaca

SEQ ID NO: 8357 - DNA, 19 bp, Artificial Sequence
  Description of Artificial Sequence: Synthetic primer
ttagcccacggacgttaca

SEQ ID NO: 8358 - DNA, 46 bp, Artificial Sequence; identical to SEQ ID NO: 1942
  Description of Artificial Sequence: Synthetic primer
  Description of Combined DNA/RNA Molecule: Synthetic primer

SEQ ID NO: 8359 - DNA, 42 bp, Artificial Sequence; identical to SEQ ID NO: 2916
  Description of Artificial Sequence: Synthetic primer
  Description of Combined DNA/RNA Molecule: Synthetic primer

SEQ ID NO: 8360 - DNA, 43 bp, Artificial Sequence; identical to SEQ ID NO: 2917
  Description of Artificial Sequence: Synthetic primer
  Description of Combined DNA/RNA Molecule: Synthetic primer

SEQ ID NO: 8361 - DNA, 53 bp, Artificial Sequence; identical to SEQ ID NO: 2918
  Description of Artificial Sequence: Synthetic primer
  Description of Combined DNA/RNA Molecule: Synthetic primer

SEQ ID NO: 8362 - DNA, 47 bp, Artificial Sequence; identical to SEQ ID NO: 2919
  Description of Artificial Sequence: Synthetic oligonucleotide
  Description of Combined DNA/RNA Molecule: Synthetic oligonucleotide

SEQ ID NO: 8363 - DNA, 49 bp, Artificial Sequence; identical to SEQ ID NO: 2920
  Description of Artificial Sequence: Synthetic oligonucleotide

SEQ ID NO: 8364 - DNA, 28 bp, Artificial Sequence
  Description of Artificial Sequence: Synthetic probe
ttgccagcatgcttcacacaggaacaca

SEQ ID NO: 8365 - DNA, 20 bp, Artificial Sequence
  Description of Artificial Sequence: Synthetic primer
ttgtgcagagcgaacaacaa

SEQ ID NO: 8366 - DNA, 21 bp, Artificial Sequence
  Description of Artificial Sequence: Synthetic primer
tggcggtacaccaaatagcaa

SEQ ID NO: 8367 - DNA, 51 bp, Artificial Sequence; identical to SEQ ID NO: 2924
  Description of Artificial Sequence: Synthetic primer
  Description of Combined DNA/RNA Molecule: Synthetic primer

SEQ ID NO: 8368 - DNA, 45 bp, Artificial Sequence; identical to SEQ ID NO: 4055
  Description of Artificial Sequence: Synthetic primer
  Description of Combined DNA/RNA Molecule: Synthetic primer

SEQ ID NO: 8369 - DNA, 45 bp, Artificial Sequence; identical to SEQ ID NO: 4056
  Description of Artificial Sequence: Synthetic primer
  Description of Combined DNA/RNA Molecule: Synthetic primer

SEQ ID NO: 8370 - DNA, 63 bp, Artificial Sequence; identical to SEQ ID NO: 4066
  Description of Artificial Sequence: Synthetic primer
  Description of Combined DNA/RNA Molecule: Synthetic primer

SEQ ID NO: 8371 - DNA, 48 bp, Artificial Sequence; identical to SEQ ID NO: 4067
  Description of Artificial Sequence: Synthetic oligonucleotide
  Description of Combined DNA/RNA Molecule: Synthetic oligonucleotide

SEQ ID NO: 8372 - DNA, 58 bp, Artificial Sequence; identical to SEQ ID NO: 4068
  Description of Artificial Sequence: Synthetic oligonucleotide

SEQ ID NO: 8373 - DNA, 32 bp, Artificial Sequence; identical to SEQ ID NO: 4069
  Description of Artificial Sequence: Synthetic probe

SEQ ID NO: 8374 - DNA, 21 bp, Artificial Sequence
  Description of Artificial Sequence: Synthetic primer
taggaacacggaggacatcaa

SEQ ID NO: 8375 - DNA, 22 bp, Artificial Sequence
  Description of Artificial Sequence: Synthetic primer
tctgacctatacccacccacaa

SEQ ID NO: 8376 - DNA, 61 bp, Artificial Sequence; identical to SEQ ID NO: 4072
  Description of Artificial Sequence: Synthetic primer
  Description of Combined DNA/RNA Molecule: Synthetic primer

SEQ ID NO: 8377 - DNA, 43 bp, Artificial Sequence; identical to SEQ ID NO: 4073
  Description of Artificial Sequence: Synthetic primer
  Description of Combined DNA/RNA Molecule: Synthetic primer

SEQ ID NO: 8378 - DNA, 45 bp, Artificial Sequence; identical to SEQ ID NO: 4074
  Description of Artificial Sequence: Synthetic primer
  Description of Combined DNA/RNA Molecule: Synthetic primer

SEQ ID NO: 8379 - DNA, 57 bp, Artificial Sequence; identical to SEQ ID NO: 4075
  Description of Artificial Sequence: Synthetic primer
  Description of Combined DNA/RNA Molecule: Synthetic primer

SEQ ID NO: 8380 - DNA, 55 bp, Artificial Sequence; identical to SEQ ID NO: 4076
  Description of Artificial Sequence: Synthetic oligonucleotide
  Description of Combined DNA/RNA Molecule: Synthetic oligonucleotide

SEQ ID NO: 8381 - DNA, 53 bp, Artificial Sequence; identical to SEQ ID NO: 4077
  Description of Artificial Sequence: Synthetic oligonucleotide

SEQ ID NO: 8382 - DNA, 33 bp, Artificial Sequence; identical to SEQ ID NO: 4078
  Description of Artificial Sequence: Synthetic probe

SEQ ID NO: 8383 - DNA, 21 bp, Artificial Sequence
  Description of Artificial Sequence: Synthetic primer
tctcataaacactccggccac

SEQ ID NO: 8384 - DNA, 20 bp, Artificial Sequence
  Description of Artificial Sequence: Synthetic primer
tctgcccgttattgagccac

SEQ ID NO: 8385 - DNA, 49 bp, Artificial Sequence; identical to SEQ ID NO: 4081
  Description of Artificial Sequence: Synthetic primer
  Description of Combined DNA/RNA Molecule: Synthetic primer

SEQ ID NO: 8386 - DNA, 39 bp, Artificial Sequence; identical to SEQ ID NO: 4109
  Description of Artificial Sequence: Synthetic primer
  Description of Combined DNA/RNA Molecule: Synthetic primer

SEQ ID NO: 8387 - DNA, 39 bp, Artificial Sequence; identical to SEQ ID NO: 4110
  Description of Artificial Sequence: Synthetic primer
  Description of Combined DNA/RNA Molecule: Synthetic primer

SEQ ID NO: 8388 - DNA, 56 bp, Artificial Sequence; identical to SEQ ID NO: 4111
  Description of Artificial Sequence: Synthetic primer
  Description of Combined DNA/RNA Molecule: Synthetic primer

SEQ ID NO: 8389 - DNA, 46 bp, Artificial Sequence; identical to SEQ ID NO: 4112
  Description of Artificial Sequence: Synthetic oligonucleotide
  Description of Combined DNA/RNA Molecule: Synthetic oligonucleotide

SEQ ID NO: 8390 - DNA, 48 bp, Artificial Sequence; identical to SEQ ID NO: 4113
  Description of Artificial Sequence: Synthetic oligonucleotide

SEQ ID NO: 8391 - DNA, 22 bp, Artificial Sequence
  Description of Artificial Sequence: Synthetic probe
ttctccccaggcctcactgcag

SEQ ID NO: 8392 - DNA, 20 bp, Artificial Sequence
  Description of Artificial Sequence: Synthetic primer
tttgcctcttgtaggtgcca

SEQ ID NO: 8393 - DNA, 19 bp, Artificial Sequence
  Description of Artificial Sequence: Synthetic primer
tgaatatccgcgttgccca

SEQ ID NO: 8394 - DNA, 48 bp, Artificial Sequence; identical to SEQ ID NO: 4117
  Description of Artificial Sequence: Synthetic primer
  Description of Combined DNA/RNA Molecule: Synthetic primer

SEQ ID NO: 8395 - DNA, 38 bp, Artificial Sequence; identical to SEQ ID NO: 5414
  Description of Artificial Sequence: Synthetic primer
  Description of Combined DNA/RNA Molecule: Synthetic primer

SEQ ID NO: 8396 - DNA, 39 bp, Artificial Sequence; identical to SEQ ID NO: 5415
  Description of Artificial Sequence: Synthetic primer
  Description of Combined DNA/RNA Molecule: Synthetic primer

SEQ ID NO: 8397 - DNA, 56 bp, Artificial Sequence; identical to SEQ ID NO: 5416
  Description of Artificial Sequence: Synthetic primer
  Description of Combined DNA/RNA Molecule: Synthetic primer

SEQ ID NO: 8398 - DNA, 48 bp, Artificial Sequence; identical to SEQ ID NO: 5417
  Description of Artificial Sequence: Synthetic oligonucleotide
  Description of Combined DNA/RNA Molecule: Synthetic oligonucleotide

SEQ ID NO: 8399 - DNA, 46 bp, Artificial Sequence; identical to SEQ ID NO: 5418
  Description of Artificial Sequence: Synthetic oligonucleotide

SEQ ID NO: 8400 - DNA, 20 bp, Artificial Sequence
  Description of Artificial Sequence: Synthetic probe
ttagccccaggtcagcccag

SEQ ID NO: 8401 - DNA, 19 bp, Artificial Sequence
  Description of Artificial Sequence: Synthetic primer
ttggcaactctccacccaa

SEQ ID NO: 8402 - DNA, 21 bp, Artificial Sequence
  Description of Artificial Sequence: Synthetic primer
tgctatcctggcgcaatacaa

SEQ ID NO: 8403 - DNA, 50 bp, Artificial Sequence; identical to SEQ ID NO: 5422
  Description of Artificial Sequence: Synthetic primer
  Description of Combined DNA/RNA Molecule: Synthetic primer

SEQ ID NO: 8404 - DNA, 46 bp, Artificial Sequence; identical to SEQ ID NO: 5442
  Description of Artificial Sequence: Synthetic primer
  Description of Combined DNA/RNA Molecule: Synthetic primer

SEQ ID NO: 8405 - DNA, 44 bp, Artificial Sequence; identical to SEQ ID NO: 5443
  Description of Artificial Sequence: Synthetic primer
  Description of Combined DNA/RNA Molecule: Synthetic primer

SEQ ID NO: 8406 - DNA, 50 bp, Artificial Sequence; identical to SEQ ID NO: 5444
  Description of Artificial Sequence: Synthetic primer
  Description of Combined DNA/RNA Molecule: Synthetic primer

SEQ ID NO: 8407 - DNA, 48 bp, Artificial Sequence; identical to SEQ ID NO: 5445
  Description of Artificial Sequence: Synthetic oligonucleotide
  Description of Combined DNA/RNA Molecule: Synthetic oligonucleotide

SEQ ID NO: 8408 - DNA, 47 bp, Artificial Sequence; identical to SEQ ID NO: 5446
  Description of Artificial Sequence: Synthetic oligonucleotide

SEQ ID NO: 8409 - DNA, 25 bp, Artificial Sequence
  Description of Artificial Sequence: Synthetic probe
ttcaccgcaagcacctcatcccctc

SEQ ID NO: 8410 - DNA, 19 bp, Artificial Sequence
  Description of Artificial Sequence: Synthetic primer
ttgcacccgcgacataacc

SEQ ID NO: 8411 - DNA, 22 bp, Artificial Sequence
  Description of Artificial Sequence: Synthetic primer
tgctccgttcgagtgaattacc

SEQ ID NO: 8412 - DNA, 45 bp, Artificial Sequence; identical to SEQ ID NO: 5450
  Description of Artificial Sequence: Synthetic primer
  Description of Combined DNA/RNA Molecule: Synthetic primer

SEQ ID NO: 8413 - DNA, 42 bp, Artificial Sequence; identical to SEQ ID NO: 5451
  Description of Artificial Sequence: Synthetic primer
  Description of Combined DNA/RNA Molecule: Synthetic primer

SEQ ID NO: 8414 - DNA, 41 bp, Artificial Sequence; identical to SEQ ID NO: 5452
  Description of Artificial Sequence: Synthetic primer
  Description of Combined DNA/RNA Molecule: Synthetic primer

SEQ ID NO: 8415 - DNA, 52 bp, Artificial Sequence; identical to SEQ ID NO: 5453
  Description of Artificial Sequence: Synthetic primer
  Description of Combined DNA/RNA Molecule: Synthetic primer

SEQ ID NO: 8416 - DNA, 50 bp, Artificial Sequence; identical to SEQ ID NO: 5454
  Description of Artificial Sequence: Synthetic oligonucleotide
  Description of Combined DNA/RNA Molecule: Synthetic oligonucleotide

SEQ ID NO: 8417 - DNA, 48 bp, Artificial Sequence; identical to SEQ ID NO: 5455
  Description of Artificial Sequence: Synthetic oligonucleotide

SEQ ID NO: 8418 - DNA, 27 bp, Artificial Sequence
  Description of Artificial Sequence: Synthetic probe
tttcctccatcctcagcccttccaaca

SEQ ID NO: 8419 - DNA, 19 bp, Artificial Sequence
  Description of Artificial Sequence: Synthetic primer
tccggcctttgacgatacc

SEQ ID NO: 8420 - DNA, 22 bp, Artificial Sequence
  Description of Artificial Sequence: Synthetic primer
tgctccgttcgagtgaattacc

SEQ ID NO: 8421 - DNA, 49 bp, Artificial Sequence; identical to SEQ ID NO: 5459
  Description of Artificial Sequence: Synthetic primer
  Description of Combined DNA/RNA Molecule: Synthetic primer

SEQ ID NO: 8422 - DNA, 40 bp, Artificial Sequence; identical to SEQ ID NO: 5460
  Description of Artificial Sequence: Synthetic primer
  Description of Combined DNA/RNA Molecule: Synthetic primer

SEQ ID NO: 8423 - DNA, 42 bp, Artificial Sequence; identical to SEQ ID NO: 5461
  Description of Artificial Sequence: Synthetic primer
  Description of Combined DNA/RNA Molecule: Synthetic primer

SEQ ID NO: 8424 - DNA, 47 bp, Artificial Sequence; identical to SEQ ID NO: 5462
  Description of Artificial Sequence: Synthetic primer
  Description of Combined DNA/RNA Molecule: Synthetic primer

SEQ ID NO: 8425 - DNA, 58 bp, Artificial Sequence; identical to SEQ ID NO: 5463
  Description of Artificial Sequence: Synthetic oligonucleotide
  Description of Combined DNA/RNA Molecule: Synthetic oligonucleotide

SEQ ID NO: 8426 - DNA, 51 bp, Artificial Sequence; identical to SEQ ID NO: 5464
  Description of Artificial Sequence: Synthetic oligonucleotide

SEQ ID NO: 8427 - DNA, 33 bp, Artificial Sequence; identical to SEQ ID NO: 5465
  Description of Artificial Sequence: Synthetic probe

SEQ ID NO: 8428 - DNA, 20 bp, Artificial Sequence
  Description of Artificial Sequence: Synthetic primer
tcgcggaaagtcccagtaac

SEQ ID NO: 8429 - DNA, 20 bp, Artificial Sequence
  Description of Artificial Sequence: Synthetic primer
tggaacgcttacaggccaac

SEQ ID NO: 8430 - DNA, 48 bp, Artificial Sequence; identical to SEQ ID NO: 5468
  Description of Artificial Sequence: Synthetic primer
  Description of Combined DNA/RNA Molecule: Synthetic primer

SEQ ID NO: 8431 - DNA, 40 bp, Artificial Sequence; identical to SEQ ID NO: 5478
  Description of Artificial Sequence: Synthetic primer
  Description of Combined DNA/RNA Molecule: Synthetic primer

SEQ ID NO: 8432 - DNA, 40 bp, Artificial Sequence; identical to SEQ ID NO: 5479
  Description of Artificial Sequence: Synthetic primer
  Description of Combined DNA/RNA Molecule: Synthetic primer

SEQ ID NO: 8433 - DNA, 58 bp, Artificial Sequence; identical to SEQ ID NO: 5480
  Description of Artificial Sequence: Synthetic primer
  Description of Combined DNA/RNA Molecule: Synthetic primer

SEQ ID NO: 8434 - DNA, 48 bp, Artificial Sequence; identical to SEQ ID NO: 5481
  Description of Artificial Sequence: Synthetic oligonucleotide
  Description of Combined DNA/RNA Molecule: Synthetic oligonucleotide

SEQ ID NO: 8435 - DNA, 53 bp, Artificial Sequence; identical to SEQ ID NO: 5482
  Description of Artificial Sequence: Synthetic oligonucleotide

SEQ ID NO: 8436 - DNA, 23 bp, Artificial Sequence
  Description of Artificial Sequence: Synthetic probe
ttgagcgcacttcctggcatggg

SEQ ID NO: 8437 - DNA, 21 bp, Artificial Sequence
  Description of Artificial Sequence: Synthetic primer
tacacgtggatatctccgacc

SEQ ID NO: 8438 - DNA, 21 bp, Artificial Sequence
  Description of Artificial Sequence: Synthetic primer
tggaactgtgtgactagcacc

SEQ ID NO: 8439 - DNA, 59 bp, Artificial Sequence; identical to SEQ ID NO: 5486
  Description of Artificial Sequence: Synthetic primer
  Description of Combined DNA/RNA Molecule: Synthetic primer

SEQ ID NO: 8440 - DNA, 47 bp, Artificial Sequence; identical to SEQ ID NO: 5514
  Description of Artificial Sequence: Synthetic primer
  Description of Combined DNA/RNA Molecule: Synthetic primer

SEQ ID NO: 8441 - DNA, 44 bp, Artificial Sequence; identical to SEQ ID NO: 5515
  Description of Artificial Sequence: Synthetic primer
  Description of Combined DNA/RNA Molecule: Synthetic primer

SEQ ID NO: 8442 - DNA, 53 bp, Artificial Sequence; identical to SEQ ID NO: 5516
  Description of Artificial Sequence: Synthetic primer
  Description of Combined DNA/RNA Molecule: Synthetic primer

SEQ ID NO: 8443 - DNA, 48 bp, Artificial Sequence; identical to SEQ ID NO: 5517
  Description of Artificial Sequence: Synthetic oligonucleotide
  Description of Combined DNA/RNA Molecule: Synthetic oligonucleotide

SEQ ID NO: 8444 - DNA, 59 bp, Artificial Sequence; identical to SEQ ID NO: 5518
  Description of Artificial Sequence: Synthetic oligonucleotide

SEQ ID NO: 8445 - DNA, 36 bp, Artificial Sequence; identical to SEQ ID NO: 5519
  Description of Artificial Sequence: Synthetic probe

SEQ ID NO: 8446 - DNA, 21 bp, Artificial Sequence
  Description of Artificial Sequence: Synthetic primer
tcacagagacttgccgatcac

SEQ ID NO: 8447 - DNA, 22 bp, Artificial Sequence
  Description of Artificial Sequence: Synthetic primer
tggccatgtctaagctacacac

SEQ ID NO: 8448 - DNA, 39 bp, Artificial Sequence; identical to SEQ ID NO: 5522
  Description of Artificial Sequence: Synthetic primer
  Description of Combined DNA/RNA Molecule: Synthetic primer

SEQ ID NO: 8449 - DNA, 39 bp, Artificial Sequence; identical to SEQ ID NO: 5523
  Description of Artificial Sequence: Synthetic primer
  Description of Combined DNA/RNA Molecule: Synthetic primer

SEQ ID NO: 8450 - DNA, 52 bp, Artificial Sequence; identical to SEQ ID NO: 5524
  Description of Artificial Sequence: Synthetic primer
  Description of Combined DNA/RNA Molecule: Synthetic primer

SEQ ID NO: 8451 - DNA, 46 bp, Artificial Sequence; identical to SEQ ID NO: 5525
  Description of Artificial Sequence: Synthetic oligonucleotide
  Description of Combined DNA/RNA Molecule: Synthetic oligonucleotide

SEQ ID NO: 8452 - DNA, 49 bp, Artificial Sequence; identical to SEQ ID NO: 5526
  Description of Artificial Sequence: Synthetic oligonucleotide

SEQ ID NO: 8453 - DNA, 29 bp, Artificial Sequence
  Description of Artificial Sequence: Synthetic probe
ttatgcgcatgtctgtcaaatcactgcct

SEQ ID NO: 8454 - DNA, 19 bp, Artificial Sequence
  Description of Artificial Sequence: Synthetic primer
ttcgtccctgcacgctaac

SEQ ID NO: 8455 - DNA, 20 bp, Artificial Sequence
  Description of Artificial Sequence: Synthetic primer
tggcctaacggtgatggaac

SEQ ID NO: 8456 - DNA, 44 bp, Artificial Sequence; identical to SEQ ID NO: 5530
  Description of Artificial Sequence: Synthetic primer
  Description of Combined DNA/RNA Molecule: Synthetic primer

SEQ ID NO: 8457 - DNA, 36 bp, Artificial Sequence; identical to SEQ ID NO: 5531
  Description of Artificial Sequence: Synthetic primer
  Description of Combined DNA/RNA Molecule: Synthetic primer

SEQ ID NO: 8458 - DNA, 38 bp, Artificial Sequence; identical to SEQ ID NO: 5532
  Description of Artificial Sequence: Synthetic primer
  Description of Combined DNA/RNA Molecule: Synthetic primer

SEQ ID NO: 8459 - DNA, 54 bp, Artificial Sequence; identical to SEQ ID NO: 5533
  Description of Artificial Sequence: Synthetic primer
  Description of Combined DNA/RNA Molecule: Synthetic primer

SEQ ID NO: 8460 - DNA, 50 bp, Artificial Sequence; identical to SEQ ID NO: 5534
  Description of Artificial Sequence: Synthetic oligonucleotide
  Description of Combined DNA/RNA Molecule: Synthetic oligonucleotide

SEQ ID NO: 8461 - DNA, 42 bp, Artificial Sequence; identical to SEQ ID NO: 5535
  Description of Artificial Sequence: Synthetic oligonucleotide

SEQ ID NO: 8462 - DNA, 24 bp, Artificial Sequence
  Description of Artificial Sequence: Synthetic probe
aaagcctcaagccaccctccacac

SEQ ID NO: 8463 - DNA, 22 bp, Artificial Sequence
  Description of Artificial Sequence: Synthetic primer
tgatgctggcaaaccctagaac

SEQ ID NO: 8464 - DNA, 20 bp, Artificial Sequence
  Description of Artificial Sequence: Synthetic primer
tggcctaacggtgatggaac

SEQ ID NO: 8465 - DNA, 52 bp, Artificial Sequence; identical to SEQ ID NO: 5539
  Description of Artificial Sequence: Synthetic primer
  Description of Combined DNA/RNA Molecule: Synthetic primer

SEQ ID NO: 8466 - DNA, 35 bp, Artificial Sequence; identical to SEQ ID NO: 5549
  Description of Artificial Sequence: Synthetic primer
  Description of Combined DNA/RNA Molecule: Synthetic primer

SEQ ID NO: 8467 - DNA, 38 bp, Artificial Sequence; identical to SEQ ID NO: 5550
  Description of Artificial Sequence: Synthetic primer
  Description of Combined DNA/RNA Molecule: Synthetic primer

SEQ ID NO: 8468 - DNA, 58 bp, Artificial Sequence; identical to SEQ ID NO: 5551
  Description of Artificial Sequence: Synthetic primer
  Description of Combined DNA/RNA Molecule: Synthetic primer

SEQ ID NO: 8469 - DNA, 48 bp, Artificial Sequence; identical to SEQ ID NO: 5552
  Description of Artificial Sequence: Synthetic oligonucleotide
  Description of Combined DNA/RNA Molecule: Synthetic oligonucleotide

SEQ ID NO: 8470 - DNA, 53 bp, Artificial Sequence; identical to SEQ ID NO: 5553
  Description of Artificial Sequence: Synthetic oligonucleotide

SEQ ID NO: 8471 - DNA, 29 bp, Artificial Sequence
  Description of Artificial Sequence: Synthetic probe
aacaccgcactggagtaccctgcacataa

SEQ ID NO: 8472 - DNA, 19 bp, Artificial Sequence
  Description of Artificial Sequence: Synthetic primer
ttttcggcatccgcttcca

SEQ ID NO: 8473 - DNA, 21 bp, Artificial Sequence
  Description of Artificial Sequence: Synthetic primer
tggcctgtcctctgttaacca

SEQ ID NO: 8474 - DNA, 53 bp, Artificial Sequence; identical to SEQ ID NO: 5557
  Description of Artificial Sequence: Synthetic primer
  Description of Combined DNA/RNA Molecule: Synthetic primer

SEQ ID NO: 8475 - DNA, 35 bp, Artificial Sequence; identical to SEQ ID NO: 5567
  Description of Artificial Sequence: Synthetic primer
  Description of Combined DNA/RNA Molecule: Synthetic primer

SEQ ID NO: 8476 - DNA, 59 bp, Artificial Sequence; identical to SEQ ID NO: 5568
  Description of Artificial Sequence: Synthetic primer
  Description of Combined DNA/RNA Molecule: Synthetic primer

SEQ ID NO: 8477 - DNA, 54 bp, Artificial Sequence; identical to SEQ ID NO: 5569
  Description of Artificial Sequence: Synthetic oligonucleotide
  Description of Combined DNA/RNA Molecule: Synthetic oligonucleotide

SEQ ID NO: 8478 - DNA, 47 bp, Artificial Sequence; identical to SEQ ID NO: 5570
  Description of Artificial Sequence: Synthetic oligonucleotide

SEQ ID NO: 8479 - DNA, 25 bp, Artificial Sequence
  Description of Artificial Sequence: Synthetic probe
ccctgtccaggcacccacagaagcc

SEQ ID NO: 8480 - DNA, 21 bp, Artificial Sequence
  Description of Artificial Sequence: Synthetic primer
tgcgactctattcacgtccaa

SEQ ID NO: 8481 - DNA, 21 bp, Artificial Sequence
  Description of Artificial Sequence: Synthetic primer
tggcggtacaccaaatagcaa

SEQ ID NO: 8482 - DNA, 56 bp, Artificial Sequence; identical to SEQ ID NO: 5574
  Description of Artificial Sequence: Synthetic primer
  Description of Combined DNA/RNA Molecule: Synthetic primer

SEQ ID NO: 8483 - DNA, 41 bp, Artificial Sequence; identical to SEQ ID NO: 5584
  Description of Artificial Sequence: Synthetic primer
  Description of Combined DNA/RNA Molecule: Synthetic primer

SEQ ID NO: 8484 - DNA, 41 bp, Artificial Sequence; identical to SEQ ID NO: 5585
  Description of Artificial Sequence: Synthetic primer
  Description of Combined DNA/RNA Molecule: Synthetic primer

SEQ ID NO: 8485 - DNA, 61 bp, Artificial Sequence; identical to SEQ ID NO: 5586
  Description of Artificial Sequence: Synthetic primer
  Description of Combined DNA/RNA Molecule: Synthetic primer

SEQ ID NO: 8486 - DNA, 46 bp, Artificial Sequence; identical to SEQ ID NO: 5587
  Description of Artificial Sequence: Synthetic oligonucleotide
  Description of Combined DNA/RNA Molecule: Synthetic oligonucleotide

SEQ ID NO: 8487 - DNA, 50 bp, Artificial Sequence; identical to SEQ ID NO: 5588
  Description of Artificial Sequence: Synthetic oligonucleotide

SEQ ID NO: 8488 - DNA, 29 bp, Artificial Sequence
  Description of Artificial Sequence: Synthetic probe
ttccctacactggactggttcaagcttcc

SEQ ID NO: 8489 - DNA, 22 bp, Artificial Sequence
  Description of Artificial Sequence: Synthetic primer
tccaaacgattaggagcgtcaa

SEQ ID NO: 8490 - DNA, 21 bp, Artificial Sequence
  Description of Artificial Sequence: Synthetic primer
tgggcgtatacctctgtccaa

SEQ ID NO: 8491 - DNA, 53 bp, Artificial Sequence; identical to SEQ ID NO: 5592
  Description of Artificial Sequence: Synthetic primer
  Description of Combined DNA/RNA Molecule: Synthetic primer

SEQ ID NO: 8492 - DNA, 41 bp, Artificial Sequence; identical to SEQ ID NO: 5593
  Description of Artificial Sequence: Synthetic primer
  Description of Combined DNA/RNA Molecule: Synthetic primer

SEQ ID NO: 8493 - DNA, 38 bp, Artificial Sequence; identical to SEQ ID NO: 5594
  Description of Artificial Sequence: Synthetic primer
  Description of Combined DNA/RNA Molecule: Synthetic primer

SEQ ID NO: 8494 - DNA, 53 bp, Artificial Sequence; identical to SEQ ID NO: 5595
  Description of Artificial Sequence: Synthetic primer
  Description of Combined DNA/RNA Molecule: Synthetic primer

SEQ ID NO: 8495 - DNA, 46 bp, Artificial Sequence; identical to SEQ ID NO: 5596
  Description of Artificial Sequence: Synthetic oligonucleotide
  Description of Combined DNA/RNA Molecule: Synthetic oligonucleotide

SEQ ID NO: 8496 - DNA, 44 bp, Artificial Sequence; identical to SEQ ID NO: 5597
  Description of Artificial Sequence: Synthetic oligonucleotide

SEQ ID NO: 8497 - DNA, 23 bp, Artificial Sequence
  Description of Artificial Sequence: Synthetic probe
ttctccgcaccccagctccagtc

SEQ ID NO: 8498 - DNA, 22 bp, Artificial Sequence
  Description of Artificial Sequence: Synthetic primer
tccaaacgattaggagcgtcaa

SEQ ID NO: 8499 - DNA, 21 bp, Artificial Sequence
  Description of Artificial Sequence: Synthetic primer
tgggcgtatacctctgtccaa

SEQ ID NO: 8500 - DNA, 48 bp, Artificial Sequence; identical to SEQ ID NO: 5601
  Description of Artificial Sequence: Synthetic primer
  Description of Combined DNA/RNA Molecule: Synthetic primer

SEQ ID NO: 8501 - DNA, 46 bp, Artificial Sequence; identical to SEQ ID NO: 5611
  Description of Artificial Sequence: Synthetic primer
  Description of Combined DNA/RNA Molecule: Synthetic primer

SEQ ID NO: 8502 - DNA, 47 bp, Artificial Sequence; identical to SEQ ID NO: 5612
  Description of Artificial Sequence: Synthetic primer
  Description of Combined DNA/RNA Molecule: Synthetic primer

SEQ ID NO: 8503 - DNA, 49 bp, Artificial Sequence; identical to SEQ ID NO: 5613
  Description of Artificial Sequence: Synthetic primer
  Description of Combined DNA/RNA Molecule: Synthetic primer

SEQ ID NO: 8504 - DNA, 47 bp, Artificial Sequence; identical to SEQ ID NO: 5614
  Description of Artificial Sequence: Synthetic oligonucleotide
  Description of Combined DNA/RNA Molecule: Synthetic oligonucleotide

SEQ ID NO: 8505 - DNA, 46 bp, Artificial Sequence; identical to SEQ ID NO: 5615
  Description of Artificial Sequence: Synthetic oligonucleotide

SEQ ID NO: 8506 - DNA, 25 bp, Artificial Sequence
  Description of Artificial Sequence: Synthetic probe
aatatcgcaggtccacatggccacc

SEQ ID NO: 8507 - DNA, 19 bp, Artificial Sequence
  Description of Artificial Sequence: Synthetic primer
ttcgtgcgtcgtgtagcaa

SEQ ID NO: 8508 - DNA, 20 bp, Artificial Sequence
  Description of Artificial Sequence: Synthetic primer
tgggtgcagaaaatgggcaa

SEQ ID NO: 8509 - DNA, 45 bp, Artificial Sequence; identical to SEQ ID NO: 5619
  Description of Artificial Sequence: Synthetic primer
  Description of Combined DNA/RNA Molecule: Synthetic primer

SEQ ID NO: 8510 - DNA, 47 bp, Artificial Sequence; identical to SEQ ID NO: 5620
  Description of Artificial Sequence: Synthetic primer
  Description of Combined DNA/RNA Molecule: Synthetic primer

SEQ ID NO: 8511 - DNA, 46 bp, Artificial Sequence; identical to SEQ ID NO: 5621
  Description of Artificial Sequence: Synthetic primer
  Description of Combined DNA/RNA Molecule: Synthetic primer

SEQ ID NO: 8512 - DNA, 51 bp, Artificial Sequence; identical to SEQ ID NO: 5622
  Description of Artificial Sequence: Synthetic primer
  Description of Combined DNA/RNA Molecule: Synthetic primer

SEQ ID NO: 8513 - DNA, 47 bp, Artificial Sequence; identical to SEQ ID NO: 5623
  Description of Artificial Sequence: Synthetic oligonucleotide
  Description of Combined DNA/RNA Molecule: Synthetic oligonucleotide

SEQ ID NO: 8514 - DNA, 42 bp, Artificial Sequence; identical to SEQ ID NO: 5624
  Description of Artificial Sequence: Synthetic oligonucleotide

SEQ ID NO: 8515 - DNA, 23 bp, Artificial Sequence
  Description of Artificial Sequence: Synthetic probe
aactccgcacctgccagccagag

SEQ ID NO: 8516 - DNA, 19 bp, Artificial Sequence
  Description of Artificial Sequence: Synthetic primer
ttcgtgcgtcgtgtagcaa

SEQ ID NO: 8517 - DNA, 20 bp, Artificial Sequence
  Description of Artificial Sequence: Synthetic primer
tgggtgcagaaaatgggcaa

SEQ ID NO: 8518 - DNA, 49 bp, Artificial Sequence; identical to SEQ ID NO: 5628
  Description of Artificial Sequence: Synthetic primer
  Description of Combined DNA/RNA Molecule: Synthetic primer

SEQ ID NO: 8519 - DNA, 42 bp, Artificial Sequence; identical to SEQ ID NO: 5629
  Description of Artificial Sequence: Synthetic primer
  Description of Combined DNA/RNA Molecule: Synthetic primer

SEQ ID NO: 8520 - DNA, 46 bp, Artificial Sequence; identical to SEQ ID NO: 5630
  Description of Artificial Sequence: Synthetic primer
  Description of Combined DNA/RNA Molecule: Synthetic primer

SEQ ID NO: 8521 - DNA, 55 bp, Artificial Sequence; identical to SEQ ID NO: 5631
  Description of Artificial Sequence: Synthetic primer
  Description of Combined DNA/RNA Molecule: Synthetic primer

SEQ ID NO: 8522 - DNA, 48 bp, Artificial Sequence; identical to SEQ ID NO: 5632
  Description of Artificial Sequence: Synthetic oligonucleotide
  Description of Combined DNA/RNA Molecule: Synthetic oligonucleotide

SEQ ID NO: 8523 - DNA, 43 bp, Artificial Sequence; identical to SEQ ID NO: 5633
  Description of Artificial Sequence: Synthetic oligonucleotide

SEQ ID NO: 8524 - DNA, 23 bp, Artificial Sequence
  Description of Artificial Sequence: Synthetic probe
aaggtctcaggagcaggagacag

SEQ ID NO: 8525 - DNA, 22 bp, Artificial Sequence
  Description of Artificial Sequence: Synthetic primer
tggcgtaaggacactctgaaac

SEQ ID NO: 8526 - DNA, 19 bp, Artificial Sequence
  Description of Artificial Sequence: Synthetic primer
tggtccgcacagaggaaac

SEQ ID NO: 8527 - DNA, 49 bp, Artificial Sequence; identical to SEQ ID NO: 5637
  Description of Artificial Sequence: Synthetic primer
  Description of Combined DNA/RNA Molecule: Synthetic primer

SEQ ID NO: 8528 - DNA, 40 bp, Artificial Sequence; identical to SEQ ID NO: 5674
  Description of Artificial Sequence: Synthetic primer
  Description of Combined DNA/RNA Molecule: Synthetic primer

SEQ ID NO: 8529 - DNA, 42 bp, Artificial Sequence; identical to SEQ ID NO: 5675
  Description of Artificial Sequence: Synthetic primer
  Description of Combined DNA/RNA Molecule: Synthetic primer

SEQ ID NO: 8530 - DNA, 48 bp, Artificial Sequence; identical to SEQ ID NO: 5676
  Description of Artificial Sequence: Synthetic primer
  Description of Combined DNA/RNA Molecule: Synthetic primer

SEQ ID NO: 8531 - DNA, 44 bp, Artificial Sequence; identical to SEQ ID NO: 5677
  Description of Artificial Sequence: Synthetic oligonucleotide
  Description of Combined DNA/RNA Molecule: Synthetic oligonucleotide

SEQ ID NO: 8532 - DNA, 45 bp, Artificial Sequence; identical to SEQ ID NO: 5678
  Description of Artificial Sequence: Synthetic oligonucleotide

SEQ ID NO: 8533 - DNA, 24 bp, Artificial Sequence
  Description of Artificial Sequence: Synthetic probe
ttgagcgcatccccagccttccac

SEQ ID NO: 8534 - DNA, 20 bp, Artificial Sequence
  Description of Artificial Sequence: Synthetic primer
tatagtcacgcaggaccaca

SEQ ID NO: 8535 - DNA, 21 bp, Artificial Sequence
  Description of Artificial Sequence: Synthetic primer
tgtcatagacagccgcaaaca

SEQ ID NO: 8536 - DNA, 45 bp, Artificial Sequence; identical to SEQ ID NO: 5682
  Description of Artificial Sequence: Synthetic primer
  Description of Combined DNA/RNA Molecule: Synthetic primer

SEQ ID NO: 8537 - DNA, 44 bp, Artificial Sequence; identical to SEQ ID NO: 5701
  Description of Artificial Sequence: Synthetic primer
  Description of Combined DNA/RNA Molecule: Synthetic primer

SEQ ID NO: 8538 - DNA, 45 bp, Artificial Sequence; identical to SEQ ID NO: 5702
  Description of Artificial Sequence: Synthetic primer
  Description of Combined DNA/RNA Molecule: Synthetic primer

SEQ ID NO: 8539 - DNA, 54 bp, Artificial Sequence; identical to SEQ ID NO: 5703
  Description of Artificial Sequence: Synthetic primer
  Description of Combined DNA/RNA Molecule: Synthetic primer

SEQ ID NO: 8540 - DNA, 51 bp, Artificial Sequence; identical to SEQ ID NO: 5704
  Description of Artificial Sequence: Synthetic oligonucleotide
  Description of Combined DNA/RNA Molecule: Synthetic oligonucleotide

SEQ ID NO: 8541 - DNA, 46 bp, Artificial Sequence; identical to SEQ ID NO: 5705
  Description of Artificial Sequence: Synthetic oligonucleotide

SEQ ID NO: 8542 - DNA, 27 bp, Artificial Sequence
  Description of Artificial Sequence: Synthetic probe
ttatcaccatgtcacacacaggagcca

SEQ ID NO: 8543 - DNA, 19 bp, Artificial Sequence
  Description of Artificial Sequence: Synthetic primer
ttcgctgcccggttaaaca

SEQ ID NO: 8544 - DNA, 22 bp, Artificial Sequence
  Description of Artificial Sequence: Synthetic primer
tgtcgagctaggtccgataaca

SEQ ID NO: 8545 - DNA, 54 bp, Artificial Sequence; identical to SEQ ID NO: 5709
  Description of Artificial Sequence: Synthetic primer
  Description of Combined DNA/RNA Molecule: Synthetic primer

SEQ ID NO: 8546 - DNA, 35 bp, Artificial Sequence; identical to SEQ ID NO: 5851
  Description of Artificial Sequence: Synthetic primer
  Description of Combined DNA/RNA Molecule: Synthetic primer

SEQ ID NO: 8547 - DNA, 40 bp, Artificial Sequence; identical to SEQ ID NO: 5852
  Description of Artificial Sequence: Synthetic primer
  Description of Combined DNA/RNA Molecule: Synthetic primer

SEQ ID NO: 8548 - DNA, 48 bp, Artificial Sequence; identical to SEQ ID NO: 5853
  Description of Artificial Sequence: Synthetic primer
  Description of Combined DNA/RNA Molecule: Synthetic primer

SEQ ID NO: 8549 - DNA, 59 bp, Artificial Sequence; identical to SEQ ID NO: 5854
  Description of Artificial Sequence: Synthetic oligonucleotide
  Description of Combined DNA/RNA Molecule: Synthetic oligonucleotide

SEQ ID NO: 8550 - DNA, 42 bp, Artificial Sequence; identical to SEQ ID NO: 5855
  Description of Artificial Sequence: Synthetic oligonucleotide

SEQ ID NO: 8551 - DNA, 24 bp, Artificial Sequence
  Description of Artificial Sequence: Synthetic probe
ttggttccaaaagccaggtcccct

SEQ ID NO: 8552 - DNA, 19 bp, Artificial Sequence
  Description of Artificial Sequence: Synthetic primer
ttggtacgaggagggcaca

SEQ ID NO: 8553 - DNA, 19 bp, Artificial Sequence
  Description of Artificial Sequence: Synthetic primer
ttagtaagggcggcagaca

SEQ ID NO: 8554 - DNA, 43 bp, Artificial Sequence; identical to SEQ ID NO: 5859
  Description of Artificial Sequence: Synthetic primer
  Description of Combined DNA/RNA Molecule: Synthetic primer

SEQ ID NO: 8555 - DNA, 49 bp, Artificial Sequence; identical to SEQ ID NO: 5860
  Description of Artificial Sequence: Synthetic primer
  Description of Combined DNA/RNA Molecule: Synthetic primer

SEQ ID NO: 8556 - DNA, 49 bp, Artificial Sequence; identical to SEQ ID NO: 5861
  Description of Artificial Sequence: Synthetic primer
  Description of Combined DNA/RNA Molecule: Synthetic primer

SEQ ID NO: 8557 - DNA, 53 bp, Artificial Sequence; identical to SEQ ID NO: 5862
  Description of Artificial Sequence: Synthetic primer
  Description of Combined DNA/RNA Molecule: Synthetic primer

SEQ ID NO: 8558 - DNA, 49 bp, Artificial Sequence; identical to SEQ ID NO: 5863
  Description of Artificial Sequence: Synthetic oligonucleotide
  Description of Combined DNA/RNA Molecule: Synthetic oligonucleotide

SEQ ID NO: 8559 - DNA, 42 bp, Artificial Sequence; identical to SEQ ID NO: 5864
  Description of Artificial Sequence: Synthetic oligonucleotide

SEQ ID NO: 8560 - DNA, 25 bp, Artificial Sequence
  Description of Artificial Sequence: Synthetic probe
aaaatgacactctgggagccctgcc

SEQ ID NO: 8561 - DNA, 21 bp, Artificial Sequence
  Description of Artificial Sequence: Synthetic primer
tcagacgcactaaacaggcaa

SEQ ID NO: 8562 - DNA, 19 bp, Artificial Sequence
  Description of Artificial Sequence: Synthetic primer
ttcacacgacgatccgcaa

SEQ ID NO: 8563 - DNA, 44 bp, Artificial Sequence; identical to SEQ ID NO: 5868
  Description of Artificial Sequence: Synthetic primer
  Description of Combined DNA/RNA Molecule: Synthetic primer

SEQ ID NO: 8564 - DNA, 38 bp, Artificial Sequence; identical to SEQ ID NO: 5904
  Description of Artificial Sequence: Synthetic primer
  Description of Combined DNA/RNA Molecule: Synthetic primer

SEQ ID NO: 8565 - DNA, 40 bp, Artificial Sequence; identical to SEQ ID NO: 5905
  Description of Artificial Sequence: Synthetic primer
  Description of Combined DNA/RNA Molecule: Synthetic primer

SEQ ID NO: 8566 - DNA, 65 bp, Artificial Sequence; identical to SEQ ID NO: 5906
  Description of Artificial Sequence: Synthetic primer
  Description of Combined DNA/RNA Molecule: Synthetic primer

SEQ ID NO: 8567 - DNA, 42 bp, Artificial Sequence; identical to SEQ ID NO: 5907
  Description of Artificial Sequence: Synthetic oligonucleotide
  Description of Combined DNA/RNA Molecule: Synthetic oligonucleotide

SEQ ID NO: 8568 - DNA, 51 bp, Artificial Sequence; identical to SEQ ID NO: 5908
  Description of Artificial Sequence: Synthetic oligonucleotide

SEQ ID NO: 8569 - DNA, 29 bp, Artificial Sequence
  Description of Artificial Sequence: Synthetic probe
ttgggctcagccagacaagatttactggg

SEQ ID NO: 8570 - DNA, 19 bp, Artificial Sequence
  Description of Artificial Sequence: Synthetic primer
tccggaccttcatcctcca

SEQ ID NO: 8571 - DNA, 20 bp, Artificial Sequence
  Description of Artificial Sequence: Synthetic primer
tactatcgtgttcctgccca

SEQ ID NO: 8572 - DNA, 58 bp, Artificial Sequence; identical to SEQ ID NO: 5912
  Description of Artificial Sequence: Synthetic primer
  Description of Combined DNA/RNA Molecule: Synthetic primer

SEQ ID NO: 8573 - DNA, 55 bp, Artificial Sequence; identical to SEQ ID NO: 5931
  Description of Artificial Sequence: Synthetic primer
  Description of Combined DNA/RNA Molecule: Synthetic primer

SEQ ID NO: 8574 - DNA, 52 bp, Artificial Sequence; identical to SEQ ID NO: 5932
  Description of Artificial Sequence: Synthetic primer
  Description of Combined DNA/RNA Molecule: Synthetic primer

SEQ ID NO: 8575 - DNA, 65 bp, Artificial Sequence; identical to SEQ ID NO: 5933
  Description of Artificial Sequence: Synthetic primer
  Description of Combined DNA/RNA Molecule: Synthetic primer

SEQ ID NO: 8576 - DNA, 43 bp, Artificial Sequence; identical to SEQ ID NO: 5934
  Description of Artificial Sequence: Synthetic oligonucleotide
  Description of Combined DNA/RNA Molecule: Synthetic oligonucleotide

SEQ ID NO: 8577 - DNA, 51 bp, Artificial Sequence; identical to SEQ ID NO: 5935
  Description of Artificial Sequence: Synthetic oligonucleotide

SEQ ID NO: 8578 - DNA, 33 bp, Artificial Sequence; identical to SEQ ID NO: 5936
  Description of Artificial Sequence: Synthetic probe

SEQ ID NO: 8579 - DNA, 19 bp, Artificial Sequence
  Description of Artificial Sequence: Synthetic primer
ttgcaaaccacccggacaa

SEQ ID NO: 8580 - DNA, 20 bp, Artificial Sequence
  Description of Artificial Sequence: Synthetic primer
taggagtcgatgctgaccaa

SEQ ID NO: 8581 - DNA, 59 bp, Artificial Sequence; identical to SEQ ID NO: 5939
  Description of Artificial Sequence: Synthetic primer
  Description of Combined DNA/RNA Molecule: Synthetic primer

SEQ ID NO: 8582 - DNA, 40 bp, Artificial Sequence; identical to SEQ ID NO: 5976
  Description of Artificial Sequence: Synthetic primer
  Description of Combined DNA/RNA Molecule: Synthetic primer

SEQ ID NO: 8583 - DNA, 42 bp, Artificial Sequence; identical to SEQ ID NO: 5977
  Description of Artificial Sequence: Synthetic primer
  Description of Combined DNA/RNA Molecule: Synthetic primer

SEQ ID NO: 8584 - DNA, 56 bp, Artificial Sequence; identical to SEQ ID NO: 5978
  Description of Artificial Sequence: Synthetic primer
  Description of Combined DNA/RNA Molecule: Synthetic primer

SEQ ID NO: 8585 - DNA, 43 bp, Artificial Sequence; identical to SEQ ID NO: 5979
  Description of Artificial Sequence: Synthetic oligonucleotide
  Description of Combined DNA/RNA Molecule: Synthetic oligonucleotide

SEQ ID NO: 8586 - DNA, 52 bp, Artificial Sequence; identical to SEQ ID NO: 5980
  Description of Artificial Sequence: Synthetic oligonucleotide

SEQ ID NO: 8587 - DNA, 27 bp, Artificial Sequence
  Description of Artificial Sequence: Synthetic probe
aacaggtcacatcacccactcaggacc

SEQ ID NO: 8588 - DNA, 21 bp, Artificial Sequence
  Description of Artificial Sequence: Synthetic primer
tcaaacaaaggcgaccacaac

SEQ ID NO: 8589 - DNA, 22 bp, Artificial Sequence
  Description of Artificial Sequence: Synthetic primer
tatgaactgcctatgcgacaac

SEQ ID NO: 8590 - DNA, 53 bp, Artificial Sequence; identical to SEQ ID NO: 5984
  Description of Artificial Sequence: Synthetic primer
  Description of Combined DNA/RNA Molecule: Synthetic primer

SEQ ID NO: 8591 - DNA, 47 bp, Artificial Sequence; identical to SEQ ID NO: 6137
  Description of Artificial Sequence: Synthetic primer
  Description of Combined DNA/RNA Molecule: Synthetic primer

SEQ ID NO: 8592 - DNA, 47 bp, Artificial Sequence; identical to SEQ ID NO: 6138
  Description of Artificial Sequence: Synthetic primer
  Description of Combined DNA/RNA Molecule: Synthetic primer

SEQ ID NO: 8593 - DNA, 55 bp, Artificial Sequence; identical to SEQ ID NO: 6139
  Description of Artificial Sequence: Synthetic primer
  Description of Combined DNA/RNA Molecule: Synthetic primer

SEQ ID NO: 8594 - DNA, 52 bp, Artificial Sequence; identical to SEQ ID NO: 6140
  Description of Artificial Sequence: Synthetic oligonucleotide
  Description of Combined DNA/RNA Molecule: Synthetic oligonucleotide

SEQ ID NO: 8595 - DNA, 48 bp, Artificial Sequence; identical to SEQ ID NO: 6141
  Description of Artificial Sequence: Synthetic oligonucleotide

SEQ ID NO: 8596 - DNA, 32 bp, Artificial Sequence; identical to SEQ ID NO: 6142
  Description of Artificial Sequence: Synthetic probe

SEQ ID NO: 8597 - DNA, 21 bp, Artificial Sequence
  Description of Artificial Sequence: Synthetic primer
tccctcgtcatctcccttacc

SEQ ID NO: 8598 - DNA, 19 bp, Artificial Sequence
  Description of Artificial Sequence: Synthetic primer
tcgctccatcaccaagacc

SEQ ID NO: 8599 - DNA, 52 bp, Artificial Sequence; identical to SEQ ID NO: 6145
  Description of Artificial Sequence: Synthetic primer
  Description of Combined DNA/RNA Molecule: Synthetic primer

SEQ ID NO: 8600 - DNA, 43 bp, Artificial Sequence; identical to SEQ ID NO: 6828
  Description of Artificial Sequence: Synthetic primer
  Description of Combined DNA/RNA Molecule: Synthetic primer

SEQ ID NO: 8601 - DNA, 45 bp, Artificial Sequence; identical to SEQ ID NO: 6829
  Description of Artificial Sequence: Synthetic primer
  Description of Combined DNA/RNA Molecule: Synthetic primer

SEQ ID NO: 8602 - DNA, 54 bp, Artificial Sequence; identical to SEQ ID NO: 6830
  Description of Artificial Sequence: Synthetic primer
  Description of Combined DNA/RNA Molecule: Synthetic primer

SEQ ID NO: 8603 - DNA, 45 bp, Artificial Sequence; identical to SEQ ID NO: 6831
  Description of Artificial Sequence: Synthetic oligonucleotide
  Description of Combined DNA/RNA Molecule: Synthetic oligonucleotide

SEQ ID NO: 8604 - DNA, 42 bp, Artificial Sequence; identical to SEQ ID NO: 6832
  Description of Artificial Sequence: Synthetic oligonucleotide

SEQ ID NO: 8605 - DNA, 22 bp, Artificial Sequence
  Description of Artificial Sequence: Synthetic probe
aaggcaacagccagcaccagcc

SEQ ID NO: 8606 - DNA, 19 bp, Artificial Sequence
  Description of Artificial Sequence: Synthetic primer
tctcgattacgctccgcac

SEQ ID NO: 8607 - DNA, 22 bp, Artificial Sequence
  Description of Artificial Sequence: Synthetic primer
tggccatgtctaagctacacac

SEQ ID NO: 8608 - DNA, 49 bp, Artificial Sequence; identical to SEQ ID NO: 6836
  Description of Artificial Sequence: Synthetic primer
  Description of Combined DNA/RNA Molecule: Synthetic primer

SEQ ID NO: 8609 - DNA, 40 bp, Artificial Sequence
  Description of Artificial Sequence: Synthetic primer
  Description of Combined DNA/RNA Molecule: Synthetic primer
acgacgacgacgaagccccatttccagagcccacaatggg

SEQ ID NO: 8610 - DNA, 43 bp, Artificial Sequence
  Description of Artificial Sequence: Synthetic primer
  Description of Combined DNA/RNA Molecule: Synthetic primer
acgacgacgacgaagctccattgtgggctctggaaatguttgc

SEQ ID NO: 8611 - DNA, 59 bp, Artificial Sequence
  Description of Artificial Sequence: Synthetic primer
  Description of Combined DNA/RNA Molecule: Synthetic primer
acgacgacgacttgacgaacataattgaaaggctcttctcttaaaccccctggcagcta

SEQ ID NO: 8612 - DNA, 43 bp, Artificial Sequence
  Description of Artificial Sequence: Synthetic oligonucleotide
  Description of Combined DNA/RNA Molecule: Synthetic oligonucleotide
tcctcgagccgatgacacagcattgaggctgctcaacaatggc

SEQ ID NO: 8613 - DNA, 53 bp, Artificial Sequence
  Description of Artificial Sequence: Synthetic oligonucleotide
atgatgacatcatcatgtcacacacaggagccagtgtaacgtccgtgggctaa

SEQ ID NO: 8614 - DNA, 35 bp, Artificial Sequence
  Description of Artificial Sequence: Synthetic probe
aactcaacaatgatgacatcatcatgtcacacaca

SEQ ID NO: 8615 - DNA, 19 bp, Artificial Sequence
  Description of Artificial Sequence: Synthetic primer
tcctcgagccgatgacaca

SEQ ID NO: 8616 - DNA, 19 bp, Artificial Sequence
  Description of Artificial Sequence: Synthetic primer
ttagcccacggacgttaca

SEQ ID NO: 8617 - DNA, 48 bp, Artificial Sequence
  Description of Artificial Sequence: Synthetic primer
  Description of Combined DNA/RNA Molecule: Synthetic primer
ttagcccacggacgttacacttctcttaaaccccctggcagttggctt

SEQ ID NO: 8618 - DNA, 39 bp, Artificial Sequence
  Description of Artificial Sequence: Synthetic primer
  Description of Combined DNA/RNA Molecule: Synthetic primer
acgacgacgacgaaacaggtcccaatgctgggcagggac

SEQ ID NO: 8619 - DNA, 38 bp, Artificial Sequence
  Description of Artificial Sequence: Synthetic primer
  Description of Combined DNA/RNA Molecule: Synthetic primer
acgacgacgacgaacccccacaggtcccaatgcugggt

SEQ ID NO: 8620 - DNA, 49 bp, Artificial Sequence
  Description of Artificial Sequence: Synthetic primer
  Description of Combined DNA/RNA Molecule: Synthetic primer
acgacgacgacttgacgaacataattggcacctggccttggtgcuggac

SEQ ID NO: 8621 - DNA, 54 bp, Artificial Sequence
  Description of Artificial Sequence: Synthetic oligonucleotide
  Description of Combined DNA/RNA Molecule: Synthetic oligonucleotide
tactatcgtatcacgccgacaggatgcactgaactgttcagttccagcaugcca

SEQ ID NO: 8622 - DNA, 44 bp, Artificial Sequence
  Description of Artificial Sequence: Synthetic oligonucleotide
tgctgcagttcccacacacccacactgtaacgtccgtgggctaa

SEQ ID NO: 8623 - DNA, 26 bp, Artificial Sequence
  Description of Artificial Sequence: Synthetic probe
aatccagcatgctgcagttcccacac

SEQ ID NO: 8624 - DNA, 21 bp, Artificial Sequence
  Description of Artificial Sequence: Synthetic primer
tactatcgtatcacgccgaca

SEQ ID NO: 8625 - DNA, 19 bp, Artificial Sequence
  Description of Artificial Sequence: Synthetic primer
ttagcccacggacgttaca

SEQ ID NO: 8626 - DNA, 47 bp, Artificial Sequence
  Description of Artificial Sequence: Synthetic primer
  Description of Combined DNA/RNA Molecule: Synthetic primer
ttagcccacggacgttacaggtgctggatgtaagtgaggtatgggta

SEQ ID NO: 8627 - DNA, 37 bp, Artificial Sequence
  Description of Artificial Sequence: Synthetic primer
  Description of Combined DNA/RNA Molecule: Synthetic primer
acgacgacgacgaacaccccaccccacagccagccta

SEQ ID NO: 8628 - DNA, 37 bp, Artificial Sequence
  Description of Artificial Sequence: Synthetic primer
  Description of Combined DNA/RNA Molecule: Synthetic primer
acgacgacgacgaacccaccccaccccacagccagct

SEQ ID NO: 8629 - DNA, 59 bp, Artificial Sequence
  Description of Artificial Sequence: Synthetic primer
  Description of Combined DNA/RNA Molecule: Synthetic primer
acgacgacgacttgacgaacataatgaaaaagcaaagcaagaagaatgtggtgcugggc

SEQ ID NO: 8630 - DNA, 44 bp, Artificial Sequence
  Description of Artificial Sequence: Synthetic oligonucleotide
  Description of Combined DNA/RNA Molecule: Synthetic oligonucleotide
ttgagaccgctgaccgacatcactggcaccctttggtcacaatt

SEQ ID NO: 8631 - DNA, 47 bp, Artificial Sequence
  Description of Artificial Sequence: Synthetic oligonucleotide
caaccacaggaaccagcagtgaggcctgtgttgcacggtcgagctaa

SEQ ID NO: 8632 - DNA, 28 bp, Artificial Sequence
  Description of Artificial Sequence: Synthetic probe
aattggtcacaaccacaggaaccagcag

SEQ ID NO: 8633 - DNA, 19 bp, Artificial Sequence
  Description of Artificial Sequence: Synthetic primer
ttgagaccgctgaccgaca

SEQ ID NO: 8634 - DNA, 19 bp, Artificial Sequence
  Description of Artificial Sequence: Synthetic primer
ttagctcgaccgtgcaaca

SEQ ID NO: 8635 - DNA, 41 bp, Artificial Sequence
  Description of Artificial Sequence: Synthetic primer
  Description of Combined DNA/RNA Molecule: Synthetic primer
acgacgacgacgaaaccaccctcagcttccacatcaagggt

SEQ ID NO: 8636 - DNA, 41 bp, Artificial Sequence
  Description of Artificial Sequence: Synthetic primer
  Description of Combined DNA/RNA Molecule: Synthetic primer
acgacgacgacgaacctcagcttccacatcaagggcatcag

SEQ ID NO: 8637 - DNA, 53 bp, Artificial Sequence
  Description of Artificial Sequence: Synthetic primer
  Description of Combined DNA/RNA Molecule: Synthetic primer
acgacgacgacttgacgaacataatggagtggaggattgggaaagacagtgta

SEQ ID NO: 8638 - DNA, 47 bp, Artificial Sequence
  Description of Artificial Sequence: Synthetic oligonucleotide
  Description of Combined DNA/RNA Molecule: Synthetic oligonucleotide
tcgcaacgtgccgaatacacaaggtgaggcaggcacactccactgat

SEQ ID NO: 8639 - DNA, 42 bp, Artificial Sequence
  Description of Artificial Sequence: Synthetic oligonucleotide
ctggcaccaccacagccccactgtgttgcacggtcgagctaa

SEQ ID NO: 8640 - DNA, 25 bp, Artificial Sequence
  Description of Artificial Sequence: Synthetic probe
ttcactccactggcaccaccacagc

SEQ ID NO: 8641 - DNA, 19 bp, Artificial Sequence
  Description of Artificial Sequence: Synthetic primer
tcgcaacgtgccgaataca

SEQ ID NO: 8642 - DNA, 19 bp, Artificial Sequence
  Description of Artificial Sequence: Synthetic primer
ttagctcgaccgtgcaaca

SEQ ID NO: 8643 - DNA, 48 bp, Artificial Sequence
  Description of Artificial Sequence: Synthetic primer
  Description of Combined DNA/RNA Molecule: Synthetic primer
ttagctcgaccgtgcaacagtggaggattgggaaagacagtatgcagc

SEQ ID NO: 8644 - DNA, 42 bp, Artificial Sequence; identical to SEQ ID NO: 119
  Description of Artificial Sequence: Synthetic primer
  Description of Combined DNA/RNA Molecule: Synthetic primer

SEQ ID NO: 8645 - DNA, 40 bp, Artificial Sequence; identical to SEQ ID NO: 120
  Description of Artificial Sequence: Synthetic primer
  Description of Combined DNA/RNA Molecule: Synthetic primer

SEQ ID NO: 8646 - DNA, 48 bp, Artificial Sequence; identical to SEQ ID NO: 1298
  Description of Artificial Sequence: Synthetic primer
  Description of Combined DNA/RNA Molecule: Synthetic primer

SEQ ID NO: 8647 - DNA, 45 bp, Artificial Sequence; identical to SEQ ID NO: 1299
  Description of Artificial Sequence: Synthetic oligonucleotide
  Description of Combined DNA/RNA Molecule: Synthetic oligonucleotide

SEQ ID NO: 8648 - DNA, 49 bp, Artificial Sequence; identical to SEQ ID NO: 1300
  Description of Artificial Sequence: Synthetic oligonucleotide

SEQ ID NO: 8649 - DNA, 30 bp, Artificial Sequence; identical to SEQ ID NO: 1301
  Description of Artificial Sequence: Synthetic probe

SEQ ID NO: 8650 - DNA, 19 bp, Artificial Sequence
  Description of Artificial Sequence: Synthetic primer
tcgcaccggaattctgacc

SEQ ID NO: 8651 - DNA, 20 bp, Artificial Sequence
  Description of Artificial Sequence: Synthetic primer
tgccgtcatgggaaactacc

SEQ ID NO: 8652 - DNA, 44 bp, Artificial Sequence; identical to SEQ ID NO: 1304
  Description of Artificial Sequence: Synthetic primer
  Description of Combined DNA/RNA Molecule: Synthetic primer

SEQ ID NO: 8653 - DNA, 25 bp, Artificial Sequence
  Description of Artificial Sequence: Synthetic primer
  Description of Combined DNA/RNA Molecule: Synthetic primer
acgacgacgacttgacgaacataac

SEQ ID NO: 8654 - DNA, 43 bp, Artificial Sequence; identical to SEQ ID NO: 1835
  Description of Artificial Sequence: Synthetic primer
  Description of Combined DNA/RNA Molecule: Synthetic primer

SEQ ID NO: 8655 - DNA, 41 bp, Artificial Sequence; identical to SEQ ID NO: 1836
  Description of Artificial Sequence: Synthetic primer
  Description of Combined DNA/RNA Molecule: Synthetic primer

SEQ ID NO: 8656 - DNA, 52 bp, Artificial Sequence; identical to SEQ ID NO: 1837
  Description of Artificial Sequence: Synthetic primer
  Description of Combined DNA/RNA Molecule: Synthetic primer

SEQ ID NO: 8657 - DNA, 42 bp, Artificial Sequence; identical to SEQ ID NO: 1838
  Description of Artificial Sequence: Synthetic oligonucleotide
  Description of Combined DNA/RNA Molecule: Synthetic oligonucleotide

SEQ ID NO: 8658 - DNA, 43 bp, Artificial Sequence; identical to SEQ ID NO: 1839
  Description of Artificial Sequence: Synthetic oligonucleotide

SEQ ID NO: 8659 - DNA, 26 bp, Artificial Sequence
  Description of Artificial Sequence: Synthetic probe
ttccagacaagcacaggcaggcagag

SEQ ID NO: 8660 - DNA, 20 bp, Artificial Sequence
  Description of Artificial Sequence: Synthetic primer
tgctatgccgcattcaacca

SEQ ID NO: 8661 - DNA, 19 bp, Artificial Sequence
  Description of Artificial Sequence: Synthetic primer
tgtcgccgaactagctcca

SEQ ID NO: 8662 - DNA, 49 bp, Artificial Sequence; identical to SEQ ID NO: 1843
  Description of Artificial Sequence: Synthetic primer
  Description of Combined DNA/RNA Molecule: Synthetic primer

SEQ ID NO: 8663 - DNA, 40 bp, Artificial Sequence; identical to SEQ ID NO: 1844
  Description of Artificial Sequence: Synthetic primer
  Description of Combined DNA/RNA Molecule: Synthetic primer

SEQ ID NO: 8664 - DNA, 42 bp, Artificial Sequence; identical to SEQ ID NO: 1845
  Description of Artificial Sequence: Synthetic primer
  Description of Combined DNA/RNA Molecule: Synthetic primer

SEQ ID NO: 8665 - DNA, 54 bp, Artificial Sequence; identical to SEQ ID NO: 1846
  Description of Artificial Sequence: Synthetic primer
  Description of Combined DNA/RNA Molecule: Synthetic primer

SEQ ID NO: 8666 - DNA, 49 bp, Artificial Sequence; identical to SEQ ID NO: 1847
  Description of Artificial Sequence: Synthetic oligonucleotide
  Description of Combined DNA/RNA Molecule: Synthetic oligonucleotide

SEQ ID NO: 8667 - DNA, 43 bp, Artificial Sequence; identical to SEQ ID NO: 1848
  Description of Artificial Sequence: Synthetic oligonucleotide

SEQ ID NO: 8668 - DNA, 27 bp, Artificial Sequence
  Description of Artificial Sequence: Synthetic probe
ttggatccaccagacaccacaggactg

SEQ ID NO: 8669 - DNA, 20 bp, Artificial Sequence
  Description of Artificial Sequence: Synthetic primer
tgtgccttacggaaaaccca

SEQ ID NO: 8670 - DNA, 19 bp, Artificial Sequence
  Description of Artificial Sequence: Synthetic primer
tgtcgccgaactagctcca

SEQ ID NO: 8671 - DNA, 47 bp, Artificial Sequence; identical to SEQ ID NO: 1852
  Description of Artificial Sequence: Synthetic primer
  Description of Combined DNA/RNA Molecule: Synthetic primer

SEQ ID NO: 8672 - DNA, 42 bp, Artificial Sequence; identical to SEQ ID NO: 2808
  Description of Artificial Sequence: Synthetic primer
  Description of Combined DNA/RNA Molecule: Synthetic primer

SEQ ID NO: 8673 - DNA, 43 bp, Artificial Sequence; identical to SEQ ID NO: 2809
  Description of Artificial Sequence: Synthetic primer
  Description of Combined DNA/RNA Molecule: Synthetic primer

SEQ ID NO: 8674 - DNA, 51 bp, Artificial Sequence; identical to SEQ ID NO: 2810
  Description of Artificial Sequence: Synthetic primer
  Description of Combined DNA/RNA Molecule: Synthetic primer

SEQ ID NO: 8675 - DNA, 49 bp, Artificial Sequence; identical to SEQ ID NO: 2811
  Description of Artificial Sequence: Synthetic oligonucleotide
  Description of Combined DNA/RNA Molecule: Synthetic oligonucleotide

SEQ ID NO: 8676 - DNA, 49 bp, Artificial Sequence; identical to SEQ ID NO: 2812
  Description of Artificial Sequence: Synthetic oligonucleotide

SEQ ID NO: 8677 - DNA, 29 bp, Artificial Sequence
  Description of Artificial Sequence: Synthetic probe
aacagaacaacctggaccaacccaccttc

SEQ ID NO: 8678 - DNA, 22 bp, Artificial Sequence
  Description of Artificial Sequence: Synthetic primer
tcgatggtcaatgagcttcaca

SEQ ID NO: 8679 - DNA, 22 bp, Artificial Sequence
  Description of Artificial Sequence: Synthetic primer
tggagagggagatcacgtaaca

SEQ ID NO: 8680 - DNA, 48 bp, Artificial Sequence; identical to SEQ ID NO: 2816
  Description of Artificial Sequence: Synthetic primer
  Description of Combined DNA/RNA Molecule: Synthetic primer

SEQ ID NO: 8681 - DNA, 38 bp, Artificial Sequence; identical to SEQ ID NO: 5172
  Description of Artificial Sequence: Synthetic primer
  Description of Combined DNA/RNA Molecule: Synthetic primer

SEQ ID NO: 8682 - DNA, 37 bp, Artificial Sequence; identical to SEQ ID NO: 5173
  Description of Artificial Sequence: Synthetic primer
  Description of Combined DNA/RNA Molecule: Synthetic primer

SEQ ID NO: 8683 - DNA, 47 bp, Artificial Sequence; identical to SEQ ID NO: 5174
  Description of Artificial Sequence: Synthetic primer
  Description of Combined DNA/RNA Molecule: Synthetic primer

SEQ ID NO: 8684 - DNA, 46 bp, Artificial Sequence; identical to SEQ ID NO: 5175
  Description of Artificial Sequence: Synthetic oligonucleotide
  Description of Combined DNA/RNA Molecule: Synthetic oligonucleotide

SEQ ID NO: 8685 - DNA, 49 bp, Artificial Sequence; identical to SEQ ID NO: 5176
  Description of Artificial Sequence: Synthetic oligonucleotide

SEQ ID NO: 8686 - DNA, 22 bp, Artificial Sequence
  Description of Artificial Sequence: Synthetic probe
tttggcgcagagcacacagctg

SEQ ID NO: 8687 - DNA, 20 bp, Artificial Sequence
  Description of Artificial Sequence: Synthetic primer
tatggactgtaccagcccaa

SEQ ID NO: 8688 - DNA, 21 bp, Artificial Sequence
  Description of Artificial Sequence: Synthetic primer
tgaacaccgcctcagtttcaa

SEQ ID NO: 8689 - DNA, 48 bp, Artificial Sequence; identical to SEQ ID NO: 5180
  Description of Artificial Sequence: Synthetic primer
  Description of Combined DNA/RNA Molecule: Synthetic primer

SEQ ID NO: 8690 - DNA, 38 bp, Artificial Sequence; identical to SEQ ID NO: 5190
  Description of Artificial Sequence: Synthetic primer
  Description of Combined DNA/RNA Molecule: Synthetic primer

SEQ ID NO: 8691 - DNA, 40 bp, Artificial Sequence; identical to SEQ ID NO: 5191
  Description of Artificial Sequence: Synthetic primer
  Description of Combined DNA/RNA Molecule: Synthetic primer

SEQ ID NO: 8692 - DNA, 54 bp, Artificial Sequence; identical to SEQ ID NO: 5192
  Description of Artificial Sequence: Synthetic primer
  Description of Combined DNA/RNA Molecule: Synthetic primer

SEQ ID NO: 8693 - DNA, 45 bp, Artificial Sequence; identical to SEQ ID NO: 5193
  Description of Artificial Sequence: Synthetic oligonucleotide
  Description of Combined DNA/RNA Molecule: Synthetic oligonucleotide

SEQ ID NO: 8694 - DNA, 42 bp, Artificial Sequence; identical to SEQ ID NO: 5194
  Description of Artificial Sequence: Synthetic oligonucleotide

SEQ ID NO: 8695 - DNA, 23 bp, Artificial Sequence
  Description of Artificial Sequence: Synthetic probe
ttcaagacaggaggagccagggc

SEQ ID NO: 8696 - DNA, 21 bp, Artificial Sequence
  Description of Artificial Sequence: Synthetic primer
tgtcgcccggtagcaataaac

SEQ ID NO: 8697 - DNA, 22 bp, Artificial Sequence
  Description of Artificial Sequence: Synthetic primer
tgaatgcaaagatcgcggaaac

SEQ ID NO: 8698 - DNA, 43 bp, Artificial Sequence; identical to SEQ ID NO: 5198
  Description of Artificial Sequence: Synthetic primer
  Description of Combined DNA/RNA Molecule: Synthetic primer

SEQ ID NO: 8699 - DNA, 37 bp, Artificial Sequence; identical to SEQ ID NO: 5199
  Description of Artificial Sequence: Synthetic primer
  Description of Combined DNA/RNA Molecule: Synthetic primer

SEQ ID NO: 8700 - DNA, 38 bp, Artificial Sequence; identical to SEQ ID NO: 5200
  Description of Artificial Sequence: Synthetic primer
  Description of Combined DNA/RNA Molecule: Synthetic primer

SEQ ID NO: 8701 - DNA, 54 bp, Artificial Sequence; identical to SEQ ID NO: 5201
  Description of Artificial Sequence: Synthetic primer
  Description of Combined DNA/RNA Molecule: Synthetic primer

SEQ ID NO: 8702 - DNA, 46 bp, Artificial Sequence; identical to SEQ ID NO: 5202
  Description of Artificial Sequence: Synthetic oligonucleotide
  Description of Combined DNA/RNA Molecule: Synthetic oligonucleotide

SEQ ID NO: 8703 - DNA, 55 bp, Artificial Sequence; identical to SEQ ID NO: 5203
  Description of Artificial Sequence: Synthetic oligonucleotide

SEQ ID NO: 8704 - DNA, 31 bp, Artificial Sequence; identical to SEQ ID NO: 5204
  Description of Artificial Sequence: Synthetic probe

SEQ ID NO: 8705 - DNA, 22 bp, Artificial Sequence
  Description of Artificial Sequence: Synthetic primer
tgtgcactagtccacgtgaaac

SEQ ID NO: 8706 - DNA, 22 bp, Artificial Sequence
  Description of Artificial Sequence: Synthetic primer
tgaatgcaaagatcgcggaaac

SEQ ID NO: 8707 - DNA, 52 bp, Artificial Sequence; identical to SEQ ID NO: 5207
  Description of Artificial Sequence: Synthetic primer
  Description of Combined DNA/RNA Molecule: Synthetic primer

SEQ ID NO: 8708 - DNA, 38 bp, Artificial Sequence; identical to SEQ ID NO: 5217
  Description of Artificial Sequence: Synthetic primer
  Description of Combined DNA/RNA Molecule: Synthetic primer

SEQ ID NO: 8709 - DNA, 39 bp, Artificial Sequence; identical to SEQ ID NO: 5218
  Description of Artificial Sequence: Synthetic primer
  Description of Combined DNA/RNA Molecule: Synthetic primer

SEQ ID NO: 8710 - DNA, 51 bp, Artificial Sequence; identical to SEQ ID NO: 5219
  Description of Artificial Sequence: Synthetic primer
  Description of Combined DNA/RNA Molecule: Synthetic primer

SEQ ID NO: 8711 - DNA, 49 bp, Artificial Sequence; identical to SEQ ID NO: 5220
  Description of Artificial Sequence: Synthetic oligonucleotide
  Description of Combined DNA/RNA Molecule: Synthetic oligonucleotide

SEQ ID NO: 8712 - DNA, 45 bp, Artificial Sequence; identical to SEQ ID NO: 5221
  Description of Artificial Sequence: Synthetic oligonucleotide

SEQ ID NO: 8713 - DNA, 28 bp, Artificial Sequence
  Description of Artificial Sequence: Synthetic probe
ttcacttcatagctgcaggcaccaccac

SEQ ID NO: 8714 - DNA, 19 bp, Artificial Sequence
  Description of Artificial Sequence: Synthetic primer
ttggcgcaacggtttccaa

SEQ ID NO: 8715 - DNA, 22 bp, Artificial Sequence
  Description of Artificial Sequence: Synthetic primer
tgacgcaggaggatgtaaacaa

SEQ ID NO: 8716 - DNA, 53 bp, Artificial Sequence; identical to SEQ ID NO: 5225
  Description of Artificial Sequence: Synthetic primer
  Description of Combined DNA/RNA Molecule: Synthetic primer

SEQ ID NO: 8717 - DNA, 45 bp, Artificial Sequence; identical to SEQ ID NO: 363
  Description of Artificial Sequence: Synthetic primer
  Description of Combined DNA/RNA Molecule: Synthetic primer

SEQ ID NO: 8718 - DNA, 48 bp, Artificial Sequence; identical to SEQ ID NO: 5227
  Description of Artificial Sequence: Synthetic primer
  Description of Combined DNA/RNA Molecule: Synthetic primer

SEQ ID NO: 8719 - DNA, 51 bp, Artificial Sequence; identical to SEQ ID NO: 5228
  Description of Artificial Sequence: Synthetic oligonucleotide
  Description of Combined DNA/RNA Molecule: Synthetic oligonucleotide

SEQ ID NO: 8720 - DNA, 50 bp, Artificial Sequence; identical to SEQ ID NO: 5229
  Description of Artificial Sequence: Synthetic oligonucleotide

SEQ ID NO: 8721 - DNA, 31 bp, Artificial Sequence; identical to SEQ ID NO: 5230
  Description of Artificial Sequence: Synthetic probe

SEQ ID NO: 8722 - DNA, 19 bp, Artificial Sequence
  Description of Artificial Sequence: Synthetic primer
ttcagcagcctggcatcac

SEQ ID NO: 8723 - DNA, 19 bp, Artificial Sequence
  Description of Artificial Sequence: Synthetic primer
tgcaaccttagcgctccac

SEQ ID NO: 8724 - DNA, 43 bp, Artificial Sequence; identical to SEQ ID NO: 5233
  Description of Artificial Sequence: Synthetic primer
  Description of Combined DNA/RNA Molecule: Synthetic primer

SEQ ID NO: 8725 - DNA, 37 bp, Artificial Sequence; identical to SEQ ID NO: 5243
  Description of Artificial Sequence: Synthetic primer
  Description of Combined DNA/RNA Molecule: Synthetic primer

SEQ ID NO: 8726 - DNA, 38 bp, Artificial Sequence; identical to SEQ ID NO: 5244
  Description of Artificial Sequence: Synthetic primer
  Description of Combined DNA/RNA Molecule: Synthetic primer

SEQ ID NO: 8727 - DNA, 53 bp, Artificial Sequence; identical to SEQ ID NO: 5245
  Description of Artificial Sequence: Synthetic primer
  Description of Combined DNA/RNA Molecule: Synthetic primer

SEQ ID NO: 8728 - DNA, 46 bp, Artificial Sequence; identical to SEQ ID NO: 5246
  Description of Artificial Sequence: Synthetic oligonucleotide
  Description of Combined DNA/RNA Molecule: Synthetic oligonucleotide

SEQ ID NO: 8729 - DNA, 43 bp, Artificial Sequence; identical to SEQ ID NO: 5247
  Description of Artificial Sequence: Synthetic oligonucleotide

SEQ ID NO: 8730 - DNA, 23 bp, Artificial Sequence
  Description of Artificial Sequence: Synthetic probe
ttctgaacaggtggagctgcagc

SEQ ID NO: 8731 - DNA, 22 bp, Artificial Sequence
  Description of Artificial Sequence: Synthetic primer
tatcgcatcaaatggagagcaa

SEQ ID NO: 8732 - DNA, 22 bp, Artificial Sequence
  Description of Artificial Sequence: Synthetic primer
tgcaacgtataacagcggtcaa

SEQ ID NO: 8733 - DNA, 50 bp, Artificial Sequence; identical to SEQ ID NO: 5251
  Description of Artificial Sequence: Synthetic primer
  Description of Combined DNA/RNA Molecule: Synthetic primer

SEQ ID NO: 8734 - DNA, 40 bp, Artificial Sequence; identical to SEQ ID NO: 5261
  Description of Artificial Sequence: Synthetic primer
  Description of Combined DNA/RNA Molecule: Synthetic primer

SEQ ID NO: 8735 - DNA, 45 bp, Artificial Sequence; identical to SEQ ID NO: 5262
  Description of Artificial Sequence: Synthetic primer
  Description of Combined DNA/RNA Molecule: Synthetic primer

SEQ ID NO: 8736 - DNA, 53 bp, Artificial Sequence; identical to SEQ ID NO: 5263
  Description of Artificial Sequence: Synthetic primer
  Description of Combined DNA/RNA Molecule: Synthetic primer

SEQ ID NO: 8737 - DNA, 43 bp, Artificial Sequence; identical to SEQ ID NO: 5264
  Description of Artificial Sequence: Synthetic oligonucleotide
  Description of Combined DNA/RNA Molecule: Synthetic oligonucleotide

SEQ ID NO: 8738 - DNA, 41 bp, Artificial Sequence; identical to SEQ ID NO: 5265
  Description of Artificial Sequence: Synthetic oligonucleotide

SEQ ID NO: 8739 - DNA, 24 bp, Artificial Sequence
  Description of Artificial Sequence: Synthetic probe
ttcaggtcagcaggcccagggaag

SEQ ID NO: 8740 - DNA, 19 bp, Artificial Sequence
  Description of Artificial Sequence: Synthetic primer
tagacacgagcgaggtcac

SEQ ID NO: 8741 - DNA, 21 bp, Artificial Sequence
  Description of Artificial Sequence: Synthetic primer
tgcacagcctgaattttgcac

SEQ ID NO: 8742 - DNA, 46 bp, Artificial Sequence; identical to SEQ ID NO: 5269
  Description of Artificial Sequence: Synthetic primer
  Description of Combined DNA/RNA Molecule: Synthetic primer

SEQ ID NO: 8743 - DNA, 38 bp, Artificial Sequence; identical to SEQ ID NO: 5279
  Description of Artificial Sequence: Synthetic primer
  Description of Combined DNA/RNA Molecule: Synthetic primer

SEQ ID NO: 8744 - DNA, 39 bp, Artificial Sequence; identical to SEQ ID NO: 5280
  Description of Artificial Sequence: Synthetic primer
  Description of Combined DNA/RNA Molecule: Synthetic primer

SEQ ID NO: 8745 - DNA, 46 bp, Artificial Sequence; identical to SEQ ID NO: 5281
  Description of Artificial Sequence: Synthetic primer
  Description of Combined DNA/RNA Molecule: Synthetic primer

SEQ ID NO: 8746 - DNA, 43 bp, Artificial Sequence; identical to SEQ ID NO: 5282
  Description of Artificial Sequence: Synthetic oligonucleotide
  Description of Combined DNA/RNA Molecule: Synthetic oligonucleotide

SEQ ID NO: 8747 - DNA, 41 bp, Artificial Sequence; identical to SEQ ID NO: 5283
  Description of Artificial Sequence: Synthetic oligonucleotide

SEQ ID NO: 8748 - DNA, 20 bp, Artificial Sequence
  Description of Artificial Sequence: Synthetic probe
ttagggccagggcacaggag

SEQ ID NO: 8749 - DNA, 20 bp, Artificial Sequence
  Description of Artificial Sequence: Synthetic primer
taccctcctagctccgtaca

SEQ ID NO: 8750 - DNA, 19 bp, Artificial Sequence
  Description of Artificial Sequence: Synthetic primer
tgcaccaccagacaacaca

SEQ ID NO: 8751 - DNA, 41 bp, Artificial Sequence; identical to SEQ ID NO: 5287
  Description of Artificial Sequence: Synthetic primer
  Description of Combined DNA/RNA Molecule: Synthetic primer

SEQ ID NO: 8752 - DNA, 41 bp, Artificial Sequence; identical to SEQ ID NO: 5297
  Description of Artificial Sequence: Synthetic primer
  Description of Combined DNA/RNA Molecule: Synthetic primer

SEQ ID NO: 8753 - DNA, 42 bp, Artificial Sequence; identical to SEQ ID NO: 5298
  Description of Artificial Sequence: Synthetic primer
  Description of Combined DNA/RNA Molecule: Synthetic primer

SEQ ID NO: 8754 - DNA, 51 bp, Artificial Sequence; identical to SEQ ID NO: 5299
  Description of Artificial Sequence: Synthetic primer
  Description of Combined DNA/RNA Molecule: Synthetic primer

SEQ ID NO: 8755 - DNA, 45 bp, Artificial Sequence; identical to SEQ ID NO: 5300
  Description of Artificial Sequence: Synthetic oligonucleotide
  Description of Combined DNA/RNA Molecule: Synthetic oligonucleotide

SEQ ID NO: 8756 - DNA, 46 bp, Artificial Sequence; identical to SEQ ID NO: 5301
  Description of Artificial Sequence: Synthetic oligonucleotide

SEQ ID NO: 8757 - DNA, 23 bp, Artificial Sequence
  Description of Artificial Sequence: Synthetic probe
ccgaggtcaggagtcagcccacc

SEQ ID NO: 8758 - DNA, 19 bp, Artificial Sequence
  Description of Artificial Sequence: Synthetic primer
taaccagttaccaccgcca

SEQ ID NO: 8759 - DNA, 21 bp, Artificial Sequence
  Description of Artificial Sequence: Synthetic primer
tgccctccaatctatcctcca

SEQ ID NO: 8760 - DNA, 49 bp, Artificial Sequence; identical to SEQ ID NO: 5305
  Description of Artificial Sequence: Synthetic primer
  Description of Combined DNA/RNA Molecule: Synthetic primer

SEQ ID NO: 8761 - DNA, 40 bp, Artificial Sequence; identical to SEQ ID NO: 5306
  Description of Artificial Sequence: Synthetic primer
  Description of Combined DNA/RNA Molecule: Synthetic primer

SEQ ID NO: 8762 - DNA, 40 bp, Artificial Sequence; identical to SEQ ID NO: 5307
  Description of Artificial Sequence: Synthetic primer
  Description of Combined DNA/RNA Molecule: Synthetic primer

SEQ ID NO: 8763 - DNA, 51 bp, Artificial Sequence; identical to SEQ ID NO: 5308
  Description of Artificial Sequence: Synthetic primer
  Description of Combined DNA/RNA Molecule: Synthetic primer

SEQ ID NO: 8764 - DNA, 50 bp, Artificial Sequence; identical to SEQ ID NO: 5309
  Description of Artificial Sequence: Synthetic oligonucleotide
  Description of Combined DNA/RNA Molecule: Synthetic oligonucleotide

SEQ ID NO: 8765 - DNA, 47 bp, Artificial Sequence; identical to SEQ ID NO: 5310
  Description of Artificial Sequence: Synthetic oligonucleotide

SEQ ID NO: 8766 - DNA, 28 bp, Artificial Sequence
  Description of Artificial Sequence: Synthetic probe
ttgcaaacaggcacaccagagaacccaa

SEQ ID NO: 8767 - DNA, 19 bp, Artificial Sequence
  Description of Artificial Sequence: Synthetic primer
tcgcaccggaattctgacc

SEQ ID NO: 8768 - DNA, 20 bp, Artificial Sequence
  Description of Artificial Sequence: Synthetic primer
tgccgtcatgggaaactacc

SEQ ID NO: 8769 - DNA, 45 bp, Artificial Sequence; identical to SEQ ID NO: 5314
  Description of Artificial Sequence: Synthetic primer
  Description of Combined DNA/RNA Molecule: Synthetic primer

SEQ ID NO: 8770 - DNA, 39 bp, Artificial Sequence; identical to SEQ ID NO: 5315
  Description of Artificial Sequence: Synthetic primer
  Description of Combined DNA/RNA Molecule: Synthetic primer

SEQ ID NO: 8771 - DNA, 39 bp, Artificial Sequence; identical to SEQ ID NO: 5316
  Description of Artificial Sequence: Synthetic primer
  Description of Combined DNA/RNA Molecule: Synthetic primer

SEQ ID NO: 8772 - DNA, 50 bp, Artificial Sequence; identical to SEQ ID NO: 5317
  Description of Artificial Sequence: Synthetic primer
  Description of Combined DNA/RNA Molecule: Synthetic primer

SEQ ID NO: 8773 - DNA, 51 bp, Artificial Sequence; identical to SEQ ID NO: 5318
  Description of Artificial Sequence: Synthetic oligonucleotide
  Description of Combined DNA/RNA Molecule: Synthetic oligonucleotide

SEQ ID NO: 8774 - DNA, 51 bp, Artificial Sequence; identical to SEQ ID NO: 5319
  Description of Artificial Sequence: Synthetic oligonucleotide

SEQ ID NO: 8775 - DNA, 29 bp, Artificial Sequence
  Description of Artificial Sequence: Synthetic probe
ttcccagcaccatgtgcctcaaccataac

SEQ ID NO: 8776 - DNA, 19 bp, Artificial Sequence
  Description of Artificial Sequence: Synthetic primer
ttgcacgttgtcctgcacc

SEQ ID NO: 8777 - DNA, 20 bp, Artificial Sequence
  Description of Artificial Sequence: Synthetic primer
tgccgtcatgggaaactacc

SEQ ID NO: 8778 - DNA, 44 bp, Artificial Sequence; identical to SEQ ID NO: 5323
  Description of Artificial Sequence: Synthetic primer
  Description of Combined DNA/RNA Molecule: Synthetic primer

SEQ ID NO: 8779 - DNA, 37 bp, Artificial Sequence; identical to SEQ ID NO: 5324
  Description of Artificial Sequence: Synthetic primer
  Description of Combined DNA/RNA Molecule: Synthetic primer

SEQ ID NO: 8780 - DNA, 39 bp, Artificial Sequence; identical to SEQ ID NO: 5325
  Description of Artificial Sequence: Synthetic primer
  Description of Combined DNA/RNA Molecule: Synthetic primer

SEQ ID NO: 8781 - DNA, 52 bp, Artificial Sequence; identical to SEQ ID NO: 5326
  Description of Artificial Sequence: Synthetic primer
  Description of Combined DNA/RNA Molecule: Synthetic primer

SEQ ID NO: 8782 - DNA, 42 bp, Artificial Sequence; identical to SEQ ID NO: 5327
  Description of Artificial Sequence: Synthetic oligonucleotide
  Description of Combined DNA/RNA Molecule: Synthetic oligonucleotide

SEQ ID NO: 8783 - DNA, 47 bp, Artificial Sequence; identical to SEQ ID NO: 5328
  Description of Artificial Sequence: Synthetic oligonucleotide

SEQ ID NO: 8784 - DNA, 26 bp, Artificial Sequence
  Description of Artificial Sequence: Synthetic probe
ttaggctcacacagcactgtctgcag

SEQ ID NO: 8785 - DNA, 19 bp, Artificial Sequence
  Description of Artificial Sequence: Synthetic primer
tgcttacccacgatgcacc

SEQ ID NO: 8786 - DNA, 20 bp, Artificial Sequence
  Description of Artificial Sequence: Synthetic primer
tgcgagcaagtcatacgacc

SEQ ID NO: 8787 - DNA, 56 bp, Artificial Sequence; identical to SEQ ID NO: 5332
  Description of Artificial Sequence: Synthetic primer
  Description of Combined DNA/RNA Molecule: Synthetic primer

SEQ ID NO: 8788 - DNA, 44 bp, Artificial Sequence; identical to SEQ ID NO: 5342
  Description of Artificial Sequence: Synthetic primer
  Description of Combined DNA/RNA Molecule: Synthetic primer

SEQ ID NO: 8789 - DNA, 49 bp, Artificial Sequence; identical to SEQ ID NO: 5343
  Description of Artificial Sequence: Synthetic primer
  Description of Combined DNA/RNA Molecule: Synthetic primer

SEQ ID NO: 8790 - DNA, 48 bp, Artificial Sequence; identical to SEQ ID NO: 5344
  Description of Artificial Sequence: Synthetic primer
  Description of Combined DNA/RNA Molecule: Synthetic primer

SEQ ID NO: 8791 - DNA, 44 bp, Artificial Sequence; identical to SEQ ID NO: 5345
  Description of Artificial Sequence: Synthetic oligonucleotide
  Description of Combined DNA/RNA Molecule: Synthetic oligonucleotide

SEQ ID NO: 8792 - DNA, 41 bp, Artificial Sequence; identical to SEQ ID NO: 5346
  Description of Artificial Sequence: Synthetic oligonucleotide

SEQ ID NO: 8793 - DNA, 25 bp, Artificial Sequence
  Description of Artificial Sequence: Synthetic probe
tttcctacagccagtgcctccacac

SEQ ID NO: 8794 - DNA, 19 bp, Artificial Sequence
  Description of Artificial Sequence: Synthetic primer
ttcgcctaccgcagtgaac

SEQ ID NO: 8795 - DNA, 19 bp, Artificial Sequence
  Description of Artificial Sequence: Synthetic primer
tgcgagcccatgtctcaac

SEQ ID NO: 8796 - DNA, 44 bp, Artificial Sequence; identical to SEQ ID NO: 5350
  Description of Artificial Sequence: Synthetic primer
  Description of Combined DNA/RNA Molecule: Synthetic primer

SEQ ID NO: 8797 - DNA, 41 bp, Artificial Sequence; identical to SEQ ID NO: 5387
  Description of Artificial Sequence: Synthetic primer
  Description of Combined DNA/RNA Molecule: Synthetic primer

SEQ ID NO: 8798 - DNA, 42 bp, Artificial Sequence; identical to SEQ ID NO: 5388
  Description of Artificial Sequence: Synthetic primer
  Description of Combined DNA/RNA Molecule: Synthetic primer

SEQ ID NO: 8799 - DNA, 49 bp, Artificial Sequence; identical to SEQ ID NO: 5389
  Description of Artificial Sequence: Synthetic primer
  Description of Combined DNA/RNA Molecule: Synthetic primer

SEQ ID NO: 8800 - DNA, 46 bp, Artificial Sequence; identical to SEQ ID NO: 5390
  Description of Artificial Sequence: Synthetic oligonucleotide
  Description of Combined DNA/RNA Molecule: Synthetic oligonucleotide

SEQ ID NO: 8801 - DNA, 49 bp, Artificial Sequence; identical to SEQ ID NO: 5391
  Description of Artificial Sequence: Synthetic oligonucleotide

SEQ ID NO: 8802 - DNA, 29 bp, Artificial Sequence
  Description of Artificial Sequence: Synthetic probe
ttaggaacaacaggcaacattggtaggga

SEQ ID NO: 8803 - DNA, 21 bp, Artificial Sequence
  Description of Artificial Sequence: Synthetic primer
tggatcgagacggaatgcaac

SEQ ID NO: 8804 - DNA, 22 bp, Artificial Sequence
  Description of Artificial Sequence: Synthetic primer
tgcgggtatcaatcagggaaac

SEQ ID NO: 8805 - DNA, 50 bp, Artificial Sequence; identical to SEQ ID NO: 5395
  Description of Artificial Sequence: Synthetic primer
  Description of Combined DNA/RNA Molecule: Synthetic primer

SEQ ID NO: 8806 - DNA, 38 bp, Artificial Sequence; identical to SEQ ID NO: 5414
  Description of Artificial Sequence: Synthetic primer
  Description of Combined DNA/RNA Molecule: Synthetic primer

SEQ ID NO: 8807 - DNA, 39 bp, Artificial Sequence; identical to SEQ ID NO: 5415
  Description of Artificial Sequence: Synthetic primer
  Description of Combined DNA/RNA Molecule: Synthetic primer

SEQ ID NO: 8808 - DNA, 56 bp, Artificial Sequence; identical to SEQ ID NO: 5416
  Description of Artificial Sequence: Synthetic primer
  Description of Combined DNA/RNA Molecule: Synthetic primer

SEQ ID NO: 8809 - DNA, 48 bp, Artificial Sequence; identical to SEQ ID NO: 5417
  Description of Artificial Sequence: Synthetic oligonucleotide
  Description of Combined DNA/RNA Molecule: Synthetic oligonucleotide

SEQ ID NO: 8810 - DNA, 46 bp, Artificial Sequence; identical to SEQ ID NO: 5418
  Description of Artificial Sequence: Synthetic oligonucleotide

SEQ ID NO: 8811 - DNA, 20 bp, Artificial Sequence
  Description of Artificial Sequence: Synthetic probe
ttagccccaggtcagcccag

SEQ ID NO: 8812 - DNA, 19 bp, Artificial Sequence
  Description of Artificial Sequence: Synthetic primer
ttggcaactctccacccaa

SEQ ID NO: 8813 - DNA, 21 bp, Artificial Sequence
  Description of Artificial Sequence: Synthetic primer
tgctatcctggcgcaatacaa

SEQ ID NO: 8814 - DNA, 50 bp, Artificial Sequence; identical to SEQ ID NO: 5422
  Description of Artificial Sequence: Synthetic primer
  Description of Combined DNA/RNA Molecule: Synthetic primer

SEQ ID NO: 8815 - DNA, 46 bp, Artificial Sequence; identical to SEQ ID NO: 5442
  Description of Artificial Sequence: Synthetic primer
  Description of Combined DNA/RNA Molecule: Synthetic primer

SEQ ID NO: 8816 - DNA, 44 bp, Artificial Sequence; identical to SEQ ID NO: 5443
  Description of Artificial Sequence: Synthetic primer
  Description of Combined DNA/RNA Molecule: Synthetic primer

SEQ ID NO: 8817 - DNA, 50 bp, Artificial Sequence; identical to SEQ ID NO: 5444
  Description of Artificial Sequence: Synthetic primer
  Description of Combined DNA/RNA Molecule: Synthetic primer

SEQ ID NO: 8818 - DNA, 48 bp, Artificial Sequence; identical to SEQ ID NO: 5445
  Description of Artificial Sequence: Synthetic oligonucleotide
  Description of Combined DNA/RNA Molecule: Synthetic oligonucleotide

SEQ ID NO: 8819 - DNA, 47 bp, Artificial Sequence; identical to SEQ ID NO: 5446
  Description of Artificial Sequence: Synthetic oligonucleotide

SEQ ID NO: 8820 - DNA, 25 bp, Artificial Sequence
  Description of Artificial Sequence: Synthetic probe
ttcaccgcaagcacctcatcccctc

SEQ ID NO: 8821 - DNA, 19 bp, Artificial Sequence
  Description of Artificial Sequence: Synthetic primer
ttgcacccgcgacataacc

SEQ ID NO: 8822 - DNA, 22 bp, Artificial Sequence
  Description of Artificial Sequence: Synthetic primer
tgctccgttcgagtgaattacc

SEQ ID NO: 8823 - DNA, 45 bp, Artificial Sequence; identical to SEQ ID NO: 5450
  Description of Artificial Sequence: Synthetic primer
  Description of Combined DNA/RNA Molecule: Synthetic primer

SEQ ID NO: 8824 - DNA, 41 bp, Artificial Sequence; identical to SEQ ID NO: 5469
  Description of Artificial Sequence: Synthetic primer
  Description of Combined DNA/RNA Molecule: Synthetic primer

SEQ ID NO: 8825 - DNA, 39 bp, Artificial Sequence; identical to SEQ ID NO: 5470
  Description of Artificial Sequence: Synthetic primer
  Description of Combined DNA/RNA Molecule: Synthetic primer

SEQ ID NO: 8826 - DNA, 55 bp, Artificial Sequence; identical to SEQ ID NO: 5471
  Description of Artificial Sequence: Synthetic primer
  Description of Combined DNA/RNA Molecule: Synthetic primer

SEQ ID NO: 8827 - DNA, 45 bp, Artificial Sequence; identical to SEQ ID NO: 5472
  Description of Artificial Sequence: Synthetic oligonucleotide
  Description of Combined DNA/RNA Molecule: Synthetic oligonucleotide

SEQ ID NO: 8828 - DNA, 45 bp, Artificial Sequence; identical to SEQ ID NO: 5473
  Description of Artificial Sequence: Synthetic oligonucleotide

SEQ ID NO: 8829 - DNA, 24 bp, Artificial Sequence
  Description of Artificial Sequence: Synthetic probe
tttgccccagcactctgctcctac

SEQ ID NO: 8830 - DNA, 21 bp, Artificial Sequence
  Description of Artificial Sequence: Synthetic primer
tgaacgctcaaacacgtgaac

SEQ ID NO: 8831 - DNA, 20 bp, Artificial Sequence
  Description of Artificial Sequence: Synthetic primer
tggaacgcttacaggccaac

SEQ ID NO: 8832 - DNA, 50 bp, Artificial Sequence; identical to SEQ ID NO: 5477
  Description of Artificial Sequence: Synthetic primer
  Description of Combined DNA/RNA Molecule: Synthetic primer

SEQ ID NO: 8833 - DNA, 39 bp, Artificial Sequence; identical to SEQ ID NO: 5558
  Description of Artificial Sequence: Synthetic primer
  Description of Combined DNA/RNA Molecule: Synthetic primer

SEQ ID NO: 8834 - DNA, 39 bp, Artificial Sequence; identical to SEQ ID NO: 5559
  Description of Artificial Sequence: Synthetic primer
  Description of Combined DNA/RNA Molecule: Synthetic primer

SEQ ID NO: 8835 - DNA, 50 bp, Artificial Sequence; identical to SEQ ID NO: 5560
  Description of Artificial Sequence: Synthetic primer
  Description of Combined DNA/RNA Molecule: Synthetic primer

SEQ ID NO: 8836 - DNA, 46 bp, Artificial Sequence; identical to SEQ ID NO: 5561
  Description of Artificial Sequence: Synthetic oligonucleotide
  Description of Combined DNA/RNA Molecule: Synthetic oligonucleotide

SEQ ID NO: 8837 - DNA, 48 bp, Artificial Sequence; identical to SEQ ID NO: 5562
  Description of Artificial Sequence: Synthetic oligonucleotide

SEQ ID NO: 8838 - DNA, 23 bp, Artificial Sequence
  Description of Artificial Sequence: Synthetic probe
aagagcgcagagccaagccaagc

SEQ ID NO: 8839 - DNA, 20 bp, Artificial Sequence
  Description of Artificial Sequence: Synthetic primer
tccgggtatacactgtccca

SEQ ID NO: 8840 - DNA, 21 bp, Artificial Sequence
  Description of Artificial Sequence: Synthetic primer
tggcctgtcctctgttaacca

SEQ ID NO: 8841 - DNA, 44 bp, Artificial Sequence; identical to SEQ ID NO: 5566
  Description of Artificial Sequence: Synthetic primer
  Description of Combined DNA/RNA Molecule: Synthetic primer

SEQ ID NO: 8842 - DNA, 41 bp, Artificial Sequence; identical to SEQ ID NO: 5773
  Description of Artificial Sequence: Synthetic primer
  Description of Combined DNA/RNA Molecule: Synthetic primer

SEQ ID NO: 8843 - DNA, 38 bp, Artificial Sequence; identical to SEQ ID NO: 5774
  Description of Artificial Sequence: Synthetic primer
  Description of Combined DNA/RNA Molecule: Synthetic primer

SEQ ID NO: 8844 - DNA, 50 bp, Artificial Sequence; identical to SEQ ID NO: 5775
  Description of Artificial Sequence: Synthetic primer
  Description of Combined DNA/RNA Molecule: Synthetic primer

SEQ ID NO: 8845 - DNA, 46 bp, Artificial Sequence; identical to SEQ ID NO: 5776
  Description of Artificial Sequence: Synthetic oligonucleotide
  Description of Combined DNA/RNA Molecule: Synthetic oligonucleotide

SEQ ID NO: 8846 - DNA, 42 bp, Artificial Sequence; identical to SEQ ID NO: 5777
  Description of Artificial Sequence: Synthetic oligonucleotide

SEQ ID NO: 8847 - DNA, 23 bp, Artificial Sequence
  Description of Artificial Sequence: Synthetic probe
ttcaagccacagctccctgccac

SEQ ID NO: 8848 - DNA, 20 bp, Artificial Sequence
  Description of Artificial Sequence: Synthetic primer
ttgtctctgcgacccatcaa

SEQ ID NO: 8849 - DNA, 19 bp, Artificial Sequence
  Description of Artificial Sequence: Synthetic primer
tgtgccgaacgtgtaccaa

SEQ ID NO: 8850 - DNA, 45 bp, Artificial Sequence; identical to SEQ ID NO: 5781
  Description of Artificial Sequence: Synthetic primer
  Description of Combined DNA/RNA Molecule: Synthetic primer

SEQ ID NO: 8851 - DNA, 35 bp, Artificial Sequence; identical to SEQ ID NO: 5877
  Description of Artificial Sequence: Synthetic primer
  Description of Combined DNA/RNA Molecule: Synthetic primer

SEQ ID NO: 8852 - DNA, 44 bp, Artificial Sequence; identical to SEQ ID NO: 5878
  Description of Artificial Sequence: Synthetic primer
  Description of Combined DNA/RNA Molecule: Synthetic primer

SEQ ID NO: 8853 - DNA, 58 bp, Artificial Sequence; identical to SEQ ID NO: 5879
  Description of Artificial Sequence: Synthetic primer
  Description of Combined DNA/RNA Molecule: Synthetic primer

SEQ ID NO: 8854 - DNA, 42 bp, Artificial Sequence; identical to SEQ ID NO: 5880
  Description of Artificial Sequence: Synthetic oligonucleotide
  Description of Combined DNA/RNA Molecule: Synthetic oligonucleotide

SEQ ID NO: 8855 - DNA, 57 bp, Artificial Sequence; identical to SEQ ID NO: 5881
  Description of Artificial Sequence: Synthetic oligonucleotide

SEQ ID NO: 8856 - DNA, 36 bp, Artificial Sequence; identical to SEQ ID NO: 5882
  Description of Artificial Sequence: Synthetic probe

SEQ ID NO: 8857 - DNA, 19 bp, Artificial Sequence
  Description of Artificial Sequence: Synthetic primer
tttcgctcgacgcatacca

SEQ ID NO: 8858 - DNA, 19 bp, Artificial Sequence
  Description of Artificial Sequence: Synthetic primer
ttttacagtagccgcgcca

SEQ ID NO: 8859 - DNA, 49 bp, Artificial Sequence; identical to SEQ ID NO: 5885
  Description of Artificial Sequence: Synthetic primer
  Description of Combined DNA/RNA Molecule: Synthetic primer

SEQ ID NO: 8860 - DNA, 40 bp, Artificial Sequence; identical to SEQ ID NO: 5895
  Description of Artificial Sequence: Synthetic primer
  Description of Combined DNA/RNA Molecule: Synthetic primer

SEQ ID NO: 8861 - DNA, 41 bp, Artificial Sequence; identical to SEQ ID NO: 5896
  Description of Artificial Sequence: Synthetic primer
  Description of Combined DNA/RNA Molecule: Synthetic primer

SEQ ID NO: 8862 - DNA, 55 bp, Artificial Sequence; identical to SEQ ID NO: 5897
  Description of Artificial Sequence: Synthetic primer
  Description of Combined DNA/RNA Molecule: Synthetic primer

SEQ ID NO: 8863 - DNA, 44 bp, Artificial Sequence; identical to SEQ ID NO: 5898
  Description of Artificial Sequence: Synthetic oligonucleotide
  Description of Combined DNA/RNA Molecule: Synthetic oligonucleotide

SEQ ID NO: 8864 - DNA, 55 bp, Artificial Sequence
  Description of Artificial Sequence: Synthetic oligonucleotide
gttttctgtgcacacttggtcttcagtactagcaccgttcgtgtcgctgtgctta

SEQ ID NO: 8865 - DNA, 35 bp, Artificial Sequence; identical to SEQ ID NO: 5900
  Description of Artificial Sequence: Synthetic probe

SEQ ID NO: 8866 - DNA, 19 bp, Artificial Sequence
  Description of Artificial Sequence: Synthetic primer
ttttcggcggcagctaaac

SEQ ID NO: 8867 - DNA, 19 bp, Artificial Sequence
  Description of Artificial Sequence: Synthetic primer
taagcacagcgacacgaac

SEQ ID NO: 8868 - DNA, 54 bp, Artificial Sequence; identical to SEQ ID NO: 5903
  Description of Artificial Sequence: Synthetic primer
  Description of Combined DNA/RNA Molecule: Synthetic primer

SEQ ID NO: 8869 - DNA, 40 bp, Artificial Sequence; identical to SEQ ID NO: 5967
  Description of Artificial Sequence: Synthetic primer
  Description of Combined DNA/RNA Molecule: Synthetic primer

SEQ ID NO: 8870 - DNA, 40 bp, Artificial Sequence; identical to SEQ ID NO: 5968
  Description of Artificial Sequence: Synthetic primer
  Description of Combined DNA/RNA Molecule: Synthetic primer

SEQ ID NO: 8871 - DNA, 55 bp, Artificial Sequence; identical to SEQ ID NO: 5969
  Description of Artificial Sequence: Synthetic primer
  Description of Combined DNA/RNA Molecule: Synthetic primer

SEQ ID NO: 8872 - DNA, 43 bp, Artificial Sequence; identical to SEQ ID NO: 5970
  Description of Artificial Sequence: Synthetic oligonucleotide
  Description of Combined DNA/RNA Molecule: Synthetic oligonucleotide

SEQ ID NO: 8873 - DNA, 46 bp, Artificial Sequence; identical to SEQ ID NO: 5971
  Description of Artificial Sequence: Synthetic oligonucleotide

SEQ ID NO: 8874 - DNA, 27 bp, Artificial Sequence
  Description of Artificial Sequence: Synthetic probe
tttgagacaacatggaggagatggcag

SEQ ID NO: 8875 - DNA, 21 bp, Artificial Sequence
  Description of Artificial Sequence: Synthetic primer
tccgactttagtgcgtcacaa

SEQ ID NO: 8876 - DNA, 20 bp, Artificial Sequence
  Description of Artificial Sequence: Synthetic primer
tatacgagcgagacccacaa

SEQ ID NO: 8877 - DNA, 48 bp, Artificial Sequence; identical to SEQ ID NO: 5975
  Description of Artificial Sequence: Synthetic primer
  Description of Combined DNA/RNA Molecule: Synthetic primer

SEQ ID NO: 8878 - DNA, 40 bp, Artificial Sequence; identical to SEQ ID NO: 5976
  Description of Artificial Sequence: Synthetic primer
  Description of Combined DNA/RNA Molecule: Synthetic primer

SEQ ID NO: 8879 - DNA, 42 bp, Artificial Sequence; identical to SEQ ID NO: 5977
  Description of Artificial Sequence: Synthetic primer
  Description of Combined DNA/RNA Molecule: Synthetic primer

SEQ ID NO: 8880 - DNA, 56 bp, Artificial Sequence; identical to SEQ ID NO: 5978
  Description of Artificial Sequence: Synthetic primer
  Description of Combined DNA/RNA Molecule: Synthetic primer

SEQ ID NO: 8881 - DNA, 43 bp, Artificial Sequence; identical to SEQ ID NO: 5979
  Description of Artificial Sequence: Synthetic oligonucleotide
  Description of Combined DNA/RNA Molecule: Synthetic oligonucleotide

SEQ ID NO: 8882 - DNA, 52 bp, Artificial Sequence; identical to SEQ ID NO: 5980
  Description of Artificial Sequence: Synthetic oligonucleotide

SEQ ID NO: 8883 - DNA, 27 bp, Artificial Sequence
  Description of Artificial Sequence: Synthetic probe
aacaggtcacatcacccactcaggacc

SEQ ID NO: 8884 - DNA, 21 bp, Artificial Sequence
  Description of Artificial Sequence: Synthetic primer
tcaaacaaaggcgaccacaac

SEQ ID NO: 8885 - DNA, 22 bp, Artificial Sequence
  Description of Artificial Sequence: Synthetic primer
tatgaactgcctatgcgacaac

SEQ ID NO: 8886 - DNA, 53 bp, Artificial Sequence; identical to SEQ ID NO: 5984
  Description of Artificial Sequence: Synthetic primer
  Description of Combined DNA/RNA Molecule: Synthetic primer

SEQ ID NO: 8887 - DNA, 42 bp, Artificial Sequence; identical to SEQ ID NO: 6084
  Description of Artificial Sequence: Synthetic primer
  Description of Combined DNA/RNA Molecule: Synthetic primer

SEQ ID NO: 8888 - DNA, 41 bp, Artificial Sequence; identical to SEQ ID NO: 6085
  Description of Artificial Sequence: Synthetic primer
  Description of Combined DNA/RNA Molecule: Synthetic primer

SEQ ID NO: 8889 - DNA, 51 bp, Artificial Sequence; identical to SEQ ID NO: 6086
  Description of Artificial Sequence: Synthetic primer
  Description of Combined DNA/RNA Molecule: Synthetic primer

SEQ ID NO: 8890 - DNA, 45 bp, Artificial Sequence; identical to SEQ ID NO: 6087
  Description of Artificial Sequence: Synthetic oligonucleotide
  Description of Combined DNA/RNA Molecule: Synthetic oligonucleotide

SEQ ID NO: 8891 - DNA, 51 bp, Artificial Sequence; identical to SEQ ID NO: 6088
  Description of Artificial Sequence: Synthetic oligonucleotide

SEQ ID NO: 8892 - DNA, 31 bp, Artificial Sequence; identical to SEQ ID NO: 6089
  Description of Artificial Sequence: Synthetic probe

SEQ ID NO: 8893 - DNA, 20 bp, Artificial Sequence
  Description of Artificial Sequence: Synthetic primer
tcgctcttcagcctcctaca

SEQ ID NO: 8894 - DNA, 22 bp, Artificial Sequence
  Description of Artificial Sequence: Synthetic primer
tccggcaataattcccagaaca

SEQ ID NO: 8895 - DNA, 45 bp, Artificial Sequence; identical to SEQ ID NO: 6092
  Description of Artificial Sequence: Synthetic primer
  Description of Combined DNA/RNA Molecule: Synthetic primer

SEQ ID NO: 8896 - DNA, 38 bp, Artificial Sequence; identical to SEQ ID NO: 6819
  Description of Artificial Sequence: Synthetic primer
  Description of Combined DNA/RNA Molecule: Synthetic primer

SEQ ID NO: 8897 - DNA, 39 bp, Artificial Sequence; identical to SEQ ID NO: 6820
  Description of Artificial Sequence: Synthetic primer
  Description of Combined DNA/RNA Molecule: Synthetic primer

SEQ ID NO: 8898 - DNA, 56 bp, Artificial Sequence; identical to SEQ ID NO: 6821
  Description of Artificial Sequence: Synthetic primer
  Description of Combined DNA/RNA Molecule: Synthetic primer

SEQ ID NO: 8899 - DNA, 46 bp, Artificial Sequence; identical to SEQ ID NO: 6822
  Description of Artificial Sequence: Synthetic oligonucleotide
  Description of Combined DNA/RNA Molecule: Synthetic oligonucleotide

SEQ ID NO: 8900 - DNA, 49 bp, Artificial Sequence; identical to SEQ ID NO: 6823
  Description of Artificial Sequence: Synthetic oligonucleotide

SEQ ID NO: 8901 - DNA, 30 bp, Artificial Sequence; identical to SEQ ID NO: 6824
  Description of Artificial Sequence: Synthetic probe

SEQ ID NO: 8902 - DNA, 19 bp, Artificial Sequence
  Description of Artificial Sequence: Synthetic primer
ttgctgtgcgcggtagaac

SEQ ID NO: 8903 - DNA, 20 bp, Artificial Sequence
  Description of Artificial Sequence: Synthetic primer
tggcaccagcttagcgtaac

SEQ ID NO: 8904 - DNA, 51 bp, Artificial Sequence; identical to SEQ ID NO: 6827
  Description of Artificial Sequence: Synthetic primer
  Description of Combined DNA/RNA Molecule: Synthetic primer

SEQ ID NO: 8905 - DNA, 42 bp, Artificial Sequence; identical to SEQ ID NO: 7431
  Description of Artificial Sequence: Synthetic primer
  Description of Combined DNA/RNA Molecule: Synthetic primer

SEQ ID NO: 8906 - DNA, 38 bp, Artificial Sequence; identical to SEQ ID NO: 7432
  Description of Artificial Sequence: Synthetic primer
  Description of Combined DNA/RNA Molecule: Synthetic primer

SEQ ID NO: 8907 - DNA, 53 bp, Artificial Sequence; identical to SEQ ID NO: 7433
  Description of Artificial Sequence: Synthetic primer
  Description of Combined DNA/RNA Molecule: Synthetic primer

SEQ ID NO: 8908 - DNA, 51 bp, Artificial Sequence; identical to SEQ ID NO: 7434
  Description of Artificial Sequence: Synthetic oligonucleotide
  Description of Combined DNA/RNA Molecule: Synthetic oligonucleotide

SEQ ID NO: 8909 - DNA, 46 bp, Artificial Sequence; identical to SEQ ID NO: 7435
  Description of Artificial Sequence: Synthetic oligonucleotide

SEQ ID NO: 8910 - DNA, 31 bp, Artificial Sequence; identical to SEQ ID NO: 7436
  Description of Artificial Sequence: Synthetic probe

SEQ ID NO: 8911 - DNA, 22 bp, Artificial Sequence
  Description of Artificial Sequence: Synthetic primer
tggcgtaaggacactctgaaac

SEQ ID NO: 8912 - DNA, 19 bp, Artificial Sequence
  Description of Artificial Sequence: Synthetic primer
tggtccgcacagaggaaac

SEQ ID NO: 8913 - DNA, 47 bp, Artificial Sequence; identical to SEQ ID NO: 7439
  Description of Artificial Sequence: Synthetic primer
  Description of Combined DNA/RNA Molecule: Synthetic primer

SEQ ID NO: 8914 - DNA, 40 bp, Artificial Sequence; identical to SEQ ID NO: 7440
  Description of Artificial Sequence: Synthetic primer
  Description of Combined DNA/RNA Molecule: Synthetic primer

SEQ ID NO: 8915 - DNA, 41 bp, Artificial Sequence; identical to SEQ ID NO: 7441
  Description of Artificial Sequence: Synthetic primer
  Description of Combined DNA/RNA Molecule: Synthetic primer

SEQ ID NO: 8916 - DNA, 49 bp, Artificial Sequence; identical to SEQ ID NO: 7442
  Description of Artificial Sequence: Synthetic primer
  Description of Combined DNA/RNA Molecule: Synthetic primer

SEQ ID NO: 8917 - DNA, 45 bp, Artificial Sequence; identical to SEQ ID NO: 7443
  Description of Artificial Sequence: Synthetic oligonucleotide
  Description of Combined DNA/RNA Molecule: Synthetic oligonucleotide

SEQ ID NO: 8918 - DNA, 46 bp, Artificial Sequence; identical to SEQ ID NO: 7444
  Description of Artificial Sequence: Synthetic oligonucleotide

SEQ ID NO: 8919 - DNA, 27 bp, Artificial Sequence
  Description of Artificial Sequence: Synthetic probe
tttccttcacagctccacaccagcaag

SEQ ID NO: 8920 - DNA, 21 bp, Artificial Sequence
  Description of Artificial Sequence: Synthetic primer
tcacgcacgtagggtctaaac

SEQ ID NO: 8921 - DNA, 20 bp, Artificial Sequence
  Description of Artificial Sequence: Synthetic primer
tgtaaccacagccggacaac

SEQ ID NO: 8922 - DNA, 44 bp, Artificial Sequence; identical to SEQ ID NO: 7448
  Description of Artificial Sequence: Synthetic primer
  Description of Combined DNA/RNA Molecule: Synthetic primer

SEQ ID NO: 8923 - DNA, 45 bp, Artificial Sequence; identical to SEQ ID NO: 7754
  Description of Artificial Sequence: Synthetic primer
  Description of Combined DNA/RNA Molecule: Synthetic primer

SEQ ID NO: 8924 - DNA, 47 bp, Artificial Sequence; identical to SEQ ID NO: 7755
  Description of Artificial Sequence: Synthetic primer
  Description of Combined DNA/RNA Molecule: Synthetic primer

SEQ ID NO: 8925 - DNA, 54 bp, Artificial Sequence; identical to SEQ ID NO: 7756
  Description of Artificial Sequence: Synthetic primer
  Description of Combined DNA/RNA Molecule: Synthetic primer

SEQ ID NO: 8926 - DNA, 43 bp, Artificial Sequence; identical to SEQ ID NO: 7757
  Description of Artificial Sequence: Synthetic oligonucleotide
  Description of Combined DNA/RNA Molecule: Synthetic oligonucleotide

SEQ ID NO: 8927 - DNA, 54 bp, Artificial Sequence; identical to SEQ ID NO: 7758
  Description of Artificial Sequence: Synthetic oligonucleotide

SEQ ID NO: 8928 - DNA, 31 bp, Artificial Sequence; identical to SEQ ID NO: 7759
  Description of Artificial Sequence: Synthetic probe

SEQ ID NO: 8929 - DNA, 21 bp, Artificial Sequence
  Description of Artificial Sequence: Synthetic primer
tgagcaaaatcttcgtcgacc

SEQ ID NO: 8930 - DNA, 20 bp, Artificial Sequence
  Description of Artificial Sequence: Synthetic primer
tgtacggaaggcatcgaacc

SEQ ID NO: 8931 - DNA, 52 bp, Artificial Sequence; identical to SEQ ID NO: 7762
  Description of Artificial Sequence: Synthetic primer
  Description of Combined DNA/RNA Molecule: Synthetic primer

SEQ ID NO: 8932 - DNA, 39 bp, Artificial Sequence
  Description of Artificial Sequence: Synthetic primer
  Description of Combined DNA/RNA Molecule: Synthetic primer
acgacgacgacgaatgtgcaccttccaccacccaccacc

SEQ ID NO: 8933 - DNA, 39 bp, Artificial Sequence
  Description of Artificial Sequence: Synthetic primer
  Description of Combined DNA/RNA Molecule: Synthetic primer
acgacgacgacgaagctgtgcaccttccaccacccaccg

SEQ ID NO: 8934 - DNA, 51 bp, Artificial Sequence
  Description of Artificial Sequence: Synthetic primer
  Description of Combined DNA/RNA Molecule: Synthetic primer
acgacgacgacttgacgaacataatgctgctgtgacaggtgaggcaggagt

SEQ ID NO: 8935 - DNA, 47 bp, Artificial Sequence
  Description of Artificial Sequence: Synthetic oligonucleotide
  Description of Combined DNA/RNA Molecule: Synthetic oligonucleotide
tctcgacgatgaaaagcaacaccactctaccccaggcccgcacacga

SEQ ID NO: 8936 - DNA, 43 bp, Artificial Sequence
  Description of Artificial Sequence: Synthetic oligonucleotide
cacagactgggcacctctgccagctgtgggtactgtccgtgga

SEQ ID NO: 8937 - DNA, 21 bp, Artificial Sequence
  Description of Artificial Sequence: Synthetic probe
ttgcccgcacacagactgggc

SEQ ID NO: 8938 - DNA, 21 bp, Artificial Sequence
  Description of Artificial Sequence: Synthetic primer
tctcgacgatgaaaagcaaca

SEQ ID NO: 8939 - DNA, 19 bp, Artificial Sequence
  Description of Artificial Sequence: Synthetic primer
tccacggacagtacccaca

SEQ ID NO: 8940 - DNA, 42 bp, Artificial Sequence
  Description of Artificial Sequence: Synthetic primer
  Description of Combined DNA/RNA Molecule: Synthetic primer
tccacggacagtacccacagcaggagcagaggctgttggcaa

SEQ ID NO: 8941 - DNA, 47 bp, Artificial Sequence; identical to SEQ ID NO: 74
  Description of Artificial Sequence: Synthetic primer
  Description of Combined DNA/RNA Molecule: Synthetic primer

SEQ ID NO: 8942 - DNA, 42 bp, Artificial Sequence
  Description of Artificial Sequence: Synthetic primer
  Description of Combined DNA/RNA Molecule: Synthetic primer
acgacgacgacgaacccacagtcaacacacagctggauggag

SEQ ID NO: 8943 - DNA, 49 bp, Artificial Sequence
  Description of Artificial Sequence: Synthetic primer
  Description of Combined DNA/RNA Molecule: Synthetic primer
acgacgacgacttgacgaacataattgcacccctgtcctgtgccaggct

SEQ ID NO: 8944 - DNA, 44 bp, Artificial Sequence
  Description of Artificial Sequence: Synthetic oligonucleotide
  Description of Combined DNA/RNA Molecule: Synthetic oligonucleotide
ttctaggcgacacgacaacagctggctgctgcagccgcagacgc

SEQ ID NO: 8945 - DNA, 46 bp, Artificial Sequence
  Description of Artificial Sequence: Synthetic oligonucleotide
gacatgctggagaggaccctgcaggtgtgtgggtactgtccgtgga

SEQ ID NO: 8946 - DNA, 24 bp, Artificial Sequence
  Description of Artificial Sequence: Synthetic probe
ttagccgcagacatgctggagagg

SEQ ID NO: 8947 - DNA, 20 bp, Artificial Sequence
  Description of Artificial Sequence: Synthetic primer
ttctaggcgacacgacaaca

SEQ ID NO: 8948 - DNA, 19 bp, Artificial Sequence
  Description of Artificial Sequence: Synthetic primer
tccacggacagtacccaca

SEQ ID NO: 8949 - DNA, 42 bp, Artificial Sequence
  Description of Artificial Sequence: Synthetic primer
  Description of Combined DNA/RNA Molecule: Synthetic primer
tccacggacagtacccacacctgtgccaggcccacttgcaga

SEQ ID NO: 8950 - DNA, 53 bp, Artificial Sequence
  Description of Artificial Sequence: Synthetic primer
  Description of Combined DNA/RNA Molecule: Synthetic primer
acgacgacgacgaactccctagaccctttatacctactttacctttcagaggc

SEQ ID NO: 8951 - DNA, 53 bp, Artificial Sequence
  Description of Artificial Sequence: Synthetic primer
  Description of Combined DNA/RNA Molecule: Synthetic primer
acgacgacgacgaagaccctttatacctactttacctttcagaggtcaagacg

SEQ ID NO: 8952 - DNA, 57 bp, Artificial Sequence
  Description of Artificial Sequence: Synthetic primer
  Description of Combined DNA/RNA Molecule: Synthetic primer
acgacgacgacttgacgaacataatcacacacccctagaggctgttagtcaagctta

SEQ ID NO: 8953 - DNA, 47 bp, Artificial Sequence
  Description of Artificial Sequence: Synthetic oligonucleotide
  Description of Combined DNA/RNA Molecule: Synthetic oligonucleotide
tttcaggccctaaccaccacacctcctgttgccacctccccacccgg

SEQ ID NO: 8954 - DNA, 43 bp, Artificial Sequence
  Description of Artificial Sequence: Synthetic oligonucleotide
cccaacacacaggcaccccccacgtgggattaagggcgatgga

SEQ ID NO: 8955 - DNA, 23 bp, Artificial Sequence
  Description of Artificial Sequence: Synthetic probe
ttctccccacccaacacacaggc

SEQ ID NO: 8956 - DNA, 20 bp, Artificial Sequence
  Description of Artificial Sequence: Synthetic primer
tttcaggccctaaccaccac

SEQ ID NO: 8957 - DNA, 20 bp, Artificial Sequence
  Description of Artificial Sequence: Synthetic primer
tccatcgcccttaatcccac

SEQ ID NO: 8958 - DNA, 52 bp, Artificial Sequence
  Description of Artificial Sequence: Synthetic primer
  Description of Combined DNA/RNA Molecule: Synthetic primer
tccatcgcccttaatcccacgctgttagtcaagcttggtacctgtatgggaa

SEQ ID NO: 8959 - DNA, 40 bp, Artificial Sequence
  Description of Artificial Sequence: Synthetic primer
  Description of Combined DNA/RNA Molecule: Synthetic primer
acgacgacgacgaagcaggcatcaggacctaggcagcttc

SEQ ID NO: 8960 - DNA, 39 bp, Artificial Sequence
  Description of Artificial Sequence: Synthetic primer
  Description of Combined DNA/RNA Molecule: Synthetic primer
acgacgacgacgaagccaggcaggcatcaggaccuaggt

SEQ ID NO: 8961 - DNA, 59 bp, Artificial Sequence
  Description of Artificial Sequence: Synthetic primer
  Description of Combined DNA/RNA Molecule: Synthetic primer
acgacgacgacttgacgaacataatcagaactcaaaatctagactgggttggcaugtta

SEQ ID NO: 8962 - DNA, 52 bp, Artificial Sequence
  Description of Artificial Sequence: Synthetic oligonucleotide
  Description of Combined DNA/RNA Molecule: Synthetic oligonucleotide
tatctcctaaaagaagccgcacgctttggattcagcaggcaaccccacttca

SEQ ID NO: 8963 - DNA, 54 bp, Artificial Sequence
  Description of Artificial Sequence: Synthetic oligonucleotide
ctttgaagctgatcacccactcaaggtgatcacagtgggattaagggcgatgga

SEQ ID NO: 8964 - DNA, 29 bp, Artificial Sequence
  Description of Artificial Sequence: Synthetic probe
ttaaccccactttgaagctgatcacccac

SEQ ID NO: 8965 - DNA, 22 bp, Artificial Sequence
  Description of Artificial Sequence: Synthetic primer
tatctcctaaaagaagccgcac

SEQ ID NO: 8966 - DNA, 20 bp, Artificial Sequence
  Description of Artificial Sequence: Synthetic primer
tccatcgcccttaatcccac

SEQ ID NO: 8967 - DNA, 53 bp, Artificial Sequence
  Description of Artificial Sequence: Synthetic primer
  Description of Combined DNA/RNA Molecule: Synthetic primer
tccatcgcccttaatcccacctcaaaatctagactgggttggcatgctgtgac

SEQ ID NO: 8968 - DNA, 45 bp, Artificial Sequence
  Description of Artificial Sequence: Synthetic primer
  Description of Combined DNA/RNA Molecule: Synthetic primer
acgacgacgacgaacaaatgagcagtgtacagggttggcaggtgc

SEQ ID NO: 8969 - DNA, 45 bp, Artificial Sequence
  Description of Artificial Sequence: Synthetic primer
  Description of Combined DNA/RNA Molecule: Synthetic primer
acgacgacgacgaatgacaatgctgcaaatgagcagtgtacagga

SEQ ID NO: 8970 - DNA, 49 bp, Artificial Sequence
  Description of Artificial Sequence: Synthetic primer
  Description of Combined DNA/RNA Molecule: Synthetic primer
acgacgacgacttgacgaacataatcatgggtgcagtggtggccugcaa

SEQ ID NO: 8971 - DNA, 48 bp, Artificial Sequence
  Description of Artificial Sequence: Synthetic oligonucleotide
  Description of Combined DNA/RNA Molecule: Synthetic oligonucleotide
tcgctcttcagcctcctacaaggcaggtttcctgtcattgacaccatg

SEQ ID NO: 8972 - DNA, 49 bp, Artificial Sequence
  Description of Artificial Sequence: Synthetic oligonucleotide
ccacatgctgcagaaagaggacccctctgttctgggaattattgccgga

SEQ ID NO: 8973 - DNA, 31 bp, Artificial Sequence
  Description of Artificial Sequence: Synthetic probe
aaattgacaccacatgctgcagaaagaggac

SEQ ID NO: 8974 - DNA, 20 bp, Artificial Sequence
  Description of Artificial Sequence: Synthetic primer
tcgctcttcagcctcctaca

SEQ ID NO: 8975 - DNA, 22 bp, Artificial Sequence
  Description of Artificial Sequence: Synthetic primer
tccggcaataattcccagaaca

SEQ ID NO: 8976 - DNA, 45 bp, Artificial Sequence
  Description of Artificial Sequence: Synthetic primer
  Description of Combined DNA/RNA Molecule: Synthetic primer
tccggcaataattcccagaacatgggtgcagtggtggcttgcaga

SEQ ID NO: 8977 - DNA, 44 bp, Artificial Sequence
  Description of Artificial Sequence: Synthetic primer
  Description of Combined DNA/RNA Molecule: Synthetic primer
acgacgacgacgaatttctgcaggtcaaagaaggacccacaggg

SEQ ID NO: 8978 - DNA, 46 bp, Artificial Sequence
  Description of Artificial Sequence: Synthetic primer
  Description of Combined DNA/RNA Molecule: Synthetic primer
acgacgacgacgaactcagggtctttctgcaggtcaaagaaggact

SEQ ID NO: 8979 - DNA, 60 bp, Artificial Sequence
  Description of Artificial Sequence: Synthetic primer
  Description of Combined DNA/RNA Molecule: Synthetic primer
acgacgacgacttgacgaacataatgaaaagtccatggatgcctactcaatgctcuttgt

SEQ ID NO: 8980 - DNA, 47 bp, Artificial Sequence
  Description of Artificial Sequence: Synthetic oligonucleotide
  Description of Combined DNA/RNA Molecule: Synthetic oligonucleotide
ttcaacgatcgcgcagacacaggagctgagaggcccaggccagaaat

SEQ ID NO: 8981 - DNA, 52 bp, Artificial Sequence
  Description of Artificial Sequence: Synthetic oligonucleotide
gaagcactcccagctggcccaagagtagagtgttctgggaattattgccgga

SEQ ID NO: 8982 - DNA, 25 bp, Artificial Sequence
  Description of Artificial Sequence: Synthetic probe
ttcaggccagaagcactcccagctg

SEQ ID NO: 8983 - DNA, 19 bp, Artificial Sequence
  Description of Artificial Sequence: Synthetic primer
ttcaacgatcgcgcagaca

SEQ ID NO: 8984 - DNA, 22 bp, Artificial Sequence
  Description of Artificial Sequence: Synthetic primer
tccggcaataattcccagaaca

SEQ ID NO: 8985 - DNA, 55 bp, Artificial Sequence
  Description of Artificial Sequence: Synthetic primer
  Description of Combined DNA/RNA Molecule: Synthetic primer
tccggcaataattcccagaacagtccatggatgcctactcaatgctctctgcctt

SEQ ID NO: 8986 - DNA, 43 bp, Artificial Sequence; identical to SEQ ID NO: 1305
  Description of Artificial Sequence: Synthetic primer
  Description of Combined DNA/RNA Molecule: Synthetic primer

SEQ ID NO: 8987 - DNA, 51 bp, Artificial Sequence; identical to SEQ ID NO: 1306
  Description of Artificial Sequence: Synthetic primer
  Description of Combined DNA/RNA Molecule: Synthetic primer

SEQ ID NO: 8988 - DNA, 45 bp, Artificial Sequence; identical to SEQ ID NO: 1307
  Description of Artificial Sequence: Synthetic oligonucleotide
  Description of Combined DNA/RNA Molecule: Synthetic oligonucleotide

SEQ ID NO: 8989 - DNA, 41 bp, Artificial Sequence; identical to SEQ ID NO: 1308
  Description of Artificial Sequence: Synthetic oligonucleotide

SEQ ID NO: 8990 - DNA, 23 bp, Artificial Sequence
  Description of Artificial Sequence: Synthetic probe
aacatggcacccatgaggtcacc

SEQ ID NO: 8991 - DNA, 19 bp, Artificial Sequence
  Description of Artificial Sequence: Synthetic primer
ttgcacgttgtcctgcacc

SEQ ID NO: 8992 - DNA, 20 bp, Artificial Sequence
  Description of Artificial Sequence: Synthetic primer
tgccgtcatgggaaactacc

SEQ ID NO: 8993 - DNA, 46 bp, Artificial Sequence; identical to SEQ ID NO: 1312
  Description of Artificial Sequence: Synthetic primer
  Description of Combined DNA/RNA Molecule: Synthetic primer

SEQ ID NO: 8994 - DNA, 36 bp, Artificial Sequence; identical to SEQ ID NO: 1331
  Description of Artificial Sequence: Synthetic primer
  Description of Combined DNA/RNA Molecule: Synthetic primer

SEQ ID NO: 8995 - DNA, 42 bp, Artificial Sequence; identical to SEQ ID NO: 1332
  Description of Artificial Sequence: Synthetic primer
  Description of Combined DNA/RNA Molecule: Synthetic primer

SEQ ID NO: 8996 - DNA, 56 bp, Artificial Sequence; identical to SEQ ID NO: 1333
  Description of Artificial Sequence: Synthetic primer
  Description of Combined DNA/RNA Molecule: Synthetic primer

SEQ ID NO: 8997 - DNA, 45 bp, Artificial Sequence; identical to SEQ ID NO: 1334
  Description of Artificial Sequence: Synthetic oligonucleotide
  Description of Combined DNA/RNA Molecule: Synthetic oligonucleotide

SEQ ID NO: 8998 - DNA, 47 bp, Artificial Sequence; identical to SEQ ID NO: 1335
  Description of Artificial Sequence: Synthetic oligonucleotide

SEQ ID NO: 8999 - DNA, 29 bp, Artificial Sequence
  Description of Artificial Sequence: Synthetic probe
ttgtgaacatcaagtgagaggccacacac

SEQ ID NO: 9000 - DNA, 19 bp, Artificial Sequence
  Description of Artificial Sequence: Synthetic primer
ttacaggccgcatagcaac

SEQ ID NO: 9001 - DNA, 19 bp, Artificial Sequence
  Description of Artificial Sequence: Synthetic primer
tgcgagcccatgtctcaac

SEQ ID NO: 9002 - DNA, 49 bp, Artificial Sequence; identical to SEQ ID NO: 1339
  Description of Artificial Sequence: Synthetic primer
  Description of Combined DNA/RNA Molecule: Synthetic primer

SEQ ID NO: 9003 - DNA, 43 bp, Artificial Sequence; identical to SEQ ID NO: 1542
  Description of Artificial Sequence: Synthetic primer
  Description of Combined DNA/RNA Molecule: Synthetic primer

SEQ ID NO: 9004 - DNA, 63 bp, Artificial Sequence; identical to SEQ ID NO: 1543
  Description of Artificial Sequence: Synthetic primer
  Description of Combined DNA/RNA Molecule: Synthetic primer

SEQ ID NO: 9005 - DNA, 47 bp, Artificial Sequence; identical to SEQ ID NO: 1544
  Description of Artificial Sequence: Synthetic oligonucleotide
  Description of Combined DNA/RNA Molecule: Synthetic oligonucleotide

SEQ ID NO: 9006 - DNA, 45 bp, Artificial Sequence; identical to SEQ ID NO: 1545
  Description of Artificial Sequence: Synthetic oligonucleotide

SEQ ID NO: 9007 - DNA, 25 bp, Artificial Sequence
  Description of Artificial Sequence: Synthetic probe
aagcattcagccaggttggccctca

SEQ ID NO: 9008 - DNA, 20 bp, Artificial Sequence
  Description of Artificial Sequence: Synthetic primer
taaccgggcctaaagtgaca

SEQ ID NO: 9009 - DNA, 22 bp, Artificial Sequence
  Description of Artificial Sequence: Synthetic primer
tggagagggagatcacgtaaca

SEQ ID NO: 9010 - DNA, 53 bp, Artificial Sequence; identical to SEQ ID NO: 1549
  Description of Artificial Sequence: Synthetic primer
  Description of Combined DNA/RNA Molecule: Synthetic primer

SEQ ID NO: 9011 - DNA, 44 bp, Artificial Sequence; identical to SEQ ID NO: 1550
  Description of Artificial Sequence: Synthetic primer
  Description of Combined DNA/RNA Molecule: Synthetic primer

SEQ ID NO: 9012 - DNA, 40 bp, Artificial Sequence; identical to SEQ ID NO: 1551
  Description of Artificial Sequence: Synthetic primer
  Description of Combined DNA/RNA Molecule: Synthetic primer

SEQ ID NO: 9013 - DNA, 48 bp, Artificial Sequence; identical to SEQ ID NO: 1552
  Description of Artificial Sequence: Synthetic primer
  Description of Combined DNA/RNA Molecule: Synthetic primer

SEQ ID NO: 9014 - DNA, 46 bp, Artificial Sequence; identical to SEQ ID NO: 1553
  Description of Artificial Sequence: Synthetic oligonucleotide
  Description of Combined DNA/RNA Molecule: Synthetic oligonucleotide

SEQ ID NO: 9015 - DNA, 44 bp, Artificial Sequence; identical to SEQ ID NO: 1554
  Description of Artificial Sequence: Synthetic oligonucleotide

SEQ ID NO: 9016 - DNA, 26 bp, Artificial Sequence
  Description of Artificial Sequence: Synthetic probe
ttcatgacacaggagcagcatgggtc

SEQ ID NO: 9017 - DNA, 22 bp, Artificial Sequence
  Description of Artificial Sequence: Synthetic primer
tcgatggtcaatgagcttcaca

SEQ ID NO: 9018 - DNA, 22 bp, Artificial Sequence
  Description of Artificial Sequence: Synthetic primer
tggagagggagatcacgtaaca

SEQ ID NO: 9019 - DNA, 45 bp, Artificial Sequence; identical to SEQ ID NO: 1558
  Description of Artificial Sequence: Synthetic primer
  Description of Combined DNA/RNA Molecule: Synthetic primer

SEQ ID NO: 9020 - DNA, 37 bp, Artificial Sequence; identical to SEQ ID NO: 1647
  Description of Artificial Sequence: Synthetic primer
  Description of Combined DNA/RNA Molecule: Synthetic primer

SEQ ID NO: 9021 - DNA, 42 bp, Artificial Sequence; identical to SEQ ID NO: 1648
  Description of Artificial Sequence: Synthetic primer
  Description of Combined DNA/RNA Molecule: Synthetic primer

SEQ ID NO: 9022 - DNA, 48 bp, Artificial Sequence; identical to SEQ ID NO: 1649
  Description of Artificial Sequence: Synthetic primer
  Description of Combined DNA/RNA Molecule: Synthetic primer

SEQ ID NO: 9023 - DNA, 48 bp, Artificial Sequence; identical to SEQ ID NO: 1650
  Description of Artificial Sequence: Synthetic oligonucleotide
  Description of Combined DNA/RNA Molecule: Synthetic oligonucleotide

SEQ ID NO: 9024 - DNA, 57 bp, Artificial Sequence; identical to SEQ ID NO: 1651
  Description of Artificial Sequence: Synthetic oligonucleotide

SEQ ID NO: 9025 - DNA, 36 bp, Artificial Sequence; identical to SEQ ID NO: 1652
  Description of Artificial Sequence: Synthetic probe

SEQ ID NO: 9026 - DNA, 20 bp, Artificial Sequence
  Description of Artificial Sequence: Synthetic primer
tccgggtatacactgtccca

SEQ ID NO: 9027 - DNA, 21 bp, Artificial Sequence
  Description of Artificial Sequence: Synthetic primer
tggcctgtcctctgttaacca

SEQ ID NO: 9028 - DNA, 46 bp, Artificial Sequence; identical to SEQ ID NO: 1655
  Description of Artificial Sequence: Synthetic primer
  Description of Combined DNA/RNA Molecule: Synthetic primer

SEQ ID NO: 9029 - DNA, 45 bp, Artificial Sequence; identical to SEQ ID NO: 1799
  Description of Artificial Sequence: Synthetic primer
  Description of Combined DNA/RNA Molecule: Synthetic primer

SEQ ID NO: 9030 - DNA, 48 bp, Artificial Sequence; identical to SEQ ID NO: 1800
  Description of Artificial Sequence: Synthetic primer
  Description of Combined DNA/RNA Molecule: Synthetic primer

SEQ ID NO: 9031 - DNA, 55 bp, Artificial Sequence; identical to SEQ ID NO: 1801
  Description of Artificial Sequence: Synthetic primer
  Description of Combined DNA/RNA Molecule: Synthetic primer

SEQ ID NO: 9032 - DNA, 47 bp, Artificial Sequence; identical to SEQ ID NO: 1802
  Description of Artificial Sequence: Synthetic oligonucleotide
  Description of Combined DNA/RNA Molecule: Synthetic oligonucleotide

SEQ ID NO: 9033 - DNA, 49 bp, Artificial Sequence; identical to SEQ ID NO: 1803
  Description of Artificial Sequence: Synthetic oligonucleotide

SEQ ID NO: 9034 - DNA, 24 bp, Artificial Sequence
  Description of Artificial Sequence: Synthetic probe
ttggagacagccaggagaggcagc

SEQ ID NO: 9035 - DNA, 21 bp, Artificial Sequence
  Description of Artificial Sequence: Synthetic primer
taatctccagacctccgaacc

SEQ ID NO: 9036 - DNA, 22 bp, Artificial Sequence
  Description of Artificial Sequence: Synthetic primer
tgtcccgttcaatccttacacc

SEQ ID NO: 9037 - DNA, 48 bp, Artificial Sequence; identical to SEQ ID NO: 1807
  Description of Artificial Sequence: Synthetic primer
  Description of Combined DNA/RNA Molecule: Synthetic primer

SEQ ID NO: 9038 - DNA, 38 bp, Artificial Sequence; identical to SEQ ID NO: 2781
  Description of Artificial Sequence: Synthetic primer
  Description of Combined DNA/RNA Molecule: Synthetic primer

SEQ ID NO: 9039 - DNA, 39 bp, Artificial Sequence; identical to SEQ ID NO: 2782
  Description of Artificial Sequence: Synthetic primer
  Description of Combined DNA/RNA Molecule: Synthetic primer

SEQ ID NO: 9040 - DNA, 53 bp, Artificial Sequence; identical to SEQ ID NO: 2783
  Description of Artificial Sequence: Synthetic primer
  Description of Combined DNA/RNA Molecule: Synthetic primer

SEQ ID NO: 9041 - DNA, 47 bp, Artificial Sequence; identical to SEQ ID NO: 2784
  Description of Artificial Sequence: Synthetic oligonucleotide
  Description of Combined DNA/RNA Molecule: Synthetic oligonucleotide

SEQ ID NO: 9042 - DNA, 47 bp, Artificial Sequence; identical to SEQ ID NO: 2785
  Description of Artificial Sequence: Synthetic oligonucleotide

SEQ ID NO: 9043 - DNA, 30 bp, Artificial Sequence; identical to SEQ ID NO: 2786
  Description of Artificial Sequence: Synthetic probe

SEQ ID NO: 9044 - DNA, 19 bp, Artificial Sequence
  Description of Artificial Sequence: Synthetic primer
tagcattcgagaacgcacc

SEQ ID NO: 9045 - DNA, 21 bp, Artificial Sequence
  Description of Artificial Sequence: Synthetic primer
tggaactgtgtgactagcacc

SEQ ID NO: 9046 - DNA, 48 bp, Artificial Sequence; identical to SEQ ID NO: 2789
  Description of Artificial Sequence: Synthetic primer
  Description of Combined DNA/RNA Molecule: Synthetic primer

SEQ ID NO: 9047 - DNA, 39 bp, Artificial Sequence; identical to SEQ ID NO: 5270
  Description of Artificial Sequence: Synthetic primer
  Description of Combined DNA/RNA Molecule: Synthetic primer

SEQ ID NO: 9048 - DNA, 37 bp, Artificial Sequence; identical to SEQ ID NO: 5271
  Description of Artificial Sequence: Synthetic primer
  Description of Combined DNA/RNA Molecule: Synthetic primer

SEQ ID NO: 9049 - DNA, 55 bp, Artificial Sequence; identical to SEQ ID NO: 5272
  Description of Artificial Sequence: Synthetic primer
  Description of Combined DNA/RNA Molecule: Synthetic primer

SEQ ID NO: 9050 - DNA, 49 bp, Artificial Sequence; identical to SEQ ID NO: 5273
  Description of Artificial Sequence: Synthetic oligonucleotide
  Description of Combined DNA/RNA Molecule: Synthetic oligonucleotide

SEQ ID NO: 9051 - DNA, 48 bp, Artificial Sequence; identical to SEQ ID NO: 5274
  Description of Artificial Sequence: Synthetic oligonucleotide

SEQ ID NO: 9052 - DNA, 26 bp, Artificial Sequence
  Description of Artificial Sequence: Synthetic probe
tttggcgcacacaacttccaggacag

SEQ ID NO: 9053 - DNA, 20 bp, Artificial Sequence
  Description of Artificial Sequence: Synthetic primer
ttcttcacagtaccgccaca

SEQ ID NO: 9054 - DNA, 19 bp, Artificial Sequence
  Description of Artificial Sequence: Synthetic primer
tgcaccaccagacaacaca

SEQ ID NO: 9055 - DNA, 45 bp, Artificial Sequence; identical to SEQ ID NO: 5278
  Description of Artificial Sequence: Synthetic primer
  Description of Combined DNA/RNA Molecule: Synthetic primer

SEQ ID NO: 9056 - DNA, 48 bp, Artificial Sequence; identical to SEQ ID NO: 5288
  Description of Artificial Sequence: Synthetic primer
  Description of Combined DNA/RNA Molecule: Synthetic primer

SEQ ID NO: 9057 - DNA, 46 bp, Artificial Sequence; identical to SEQ ID NO: 5289
  Description of Artificial Sequence: Synthetic primer
  Description of Combined DNA/RNA Molecule: Synthetic primer

SEQ ID NO: 9058 - DNA, 52 bp, Artificial Sequence; identical to SEQ ID NO: 5290
  Description of Artificial Sequence: Synthetic primer
  Description of Combined DNA/RNA Molecule: Synthetic primer

SEQ ID NO: 9059 - DNA, 47 bp, Artificial Sequence; identical to SEQ ID NO: 5291
  Description of Artificial Sequence: Synthetic oligonucleotide
  Description of Combined DNA/RNA Molecule: Synthetic oligonucleotide

SEQ ID NO: 9060 - DNA, 50 bp, Artificial Sequence; identical to SEQ ID NO: 5292
  Description of Artificial Sequence: Synthetic oligonucleotide

SEQ ID NO: 9061 - DNA, 29 bp, Artificial Sequence
  Description of Artificial Sequence: Synthetic probe
aactcttcagcaggtagcacaccttgtcc

SEQ ID NO: 9062 - DNA, 21 bp, Artificial Sequence
  Description of Artificial Sequence: Synthetic primer
tcatcgccctcagatcttcca

SEQ ID NO: 9063 - DNA, 21 bp, Artificial Sequence
  Description of Artificial Sequence: Synthetic primer
tgccctccaatctatcctcca

SEQ ID NO: 9064 - DNA, 47 bp, Artificial Sequence; identical to SEQ ID NO: 5296
  Description of Artificial Sequence: Synthetic primer
  Description of Combined DNA/RNA Molecule: Synthetic primer

SEQ ID NO: 9065 - DNA, 45 bp, Artificial Sequence; identical to SEQ ID NO: 5496
  Description of Artificial Sequence: Synthetic primer
  Description of Combined DNA/RNA Molecule: Synthetic primer

SEQ ID NO: 9066 - DNA, 46 bp, Artificial Sequence; identical to SEQ ID NO: 5497
  Description of Artificial Sequence: Synthetic primer
  Description of Combined DNA/RNA Molecule: Synthetic primer

SEQ ID NO: 9067 - DNA, 55 bp, Artificial Sequence; identical to SEQ ID NO: 5498
  Description of Artificial Sequence: Synthetic primer
  Description of Combined DNA/RNA Molecule: Synthetic primer

SEQ ID NO: 9068 - DNA, 54 bp, Artificial Sequence; identical to SEQ ID NO: 5499
  Description of Artificial Sequence: Synthetic oligonucleotide
  Description of Combined DNA/RNA Molecule: Synthetic oligonucleotide

SEQ ID NO: 9069 - DNA, 53 bp, Artificial Sequence; identical to SEQ ID NO: 5500
  Description of Artificial Sequence: Synthetic oligonucleotide

SEQ ID NO: 9070 - DNA, 29 bp, Artificial Sequence
  Description of Artificial Sequence: Synthetic probe
cctgggacaatggagagagtctcactctg

SEQ ID NO: 9071 - DNA, 22 bp, Artificial Sequence
  Description of Artificial Sequence: Synthetic primer
tcgatggtcaatgagcttcaca

SEQ ID NO: 9072 - DNA, 22 bp, Artificial Sequence
  Description of Artificial Sequence: Synthetic primer
tggagagggagatcacgtaaca

SEQ ID NO: 9073 - DNA, 51 bp, Artificial Sequence; identical to SEQ ID NO: 5504
  Description of Artificial Sequence: Synthetic primer
  Description of Combined DNA/RNA Molecule: Synthetic primer

SEQ ID NO: 9074 - DNA, 35 bp, Artificial Sequence; identical to SEQ ID NO: 5567
  Description of Artificial Sequence: Synthetic primer
  Description of Combined DNA/RNA Molecule: Synthetic primer

SEQ ID NO: 9075 - DNA, 59 bp, Artificial Sequence; identical to SEQ ID NO: 5568
  Description of Artificial Sequence: Synthetic primer
  Description of Combined DNA/RNA Molecule: Synthetic primer

SEQ ID NO: 9076 - DNA, 54 bp, Artificial Sequence; identical to SEQ ID NO: 5569
  Description of Artificial Sequence: Synthetic oligonucleotide
  Description of Combined DNA/RNA Molecule: Synthetic oligonucleotide

SEQ ID NO: 9077 - DNA, 47 bp, Artificial Sequence; identical to SEQ ID NO: 5570
  Description of Artificial Sequence: Synthetic oligonucleotide

SEQ ID NO: 9078 - DNA, 25 bp, Artificial Sequence
  Description of Artificial Sequence: Synthetic probe
ccctgtccaggcacccacagaagcc

SEQ ID NO: 9079 - DNA, 21 bp, Artificial Sequence
  Description of Artificial Sequence: Synthetic primer
tgcgactctattcacgtccaa

SEQ ID NO: 9080 - DNA, 21 bp, Artificial Sequence
  Description of Artificial Sequence: Synthetic primer
tggcggtacaccaaatagcaa

SEQ ID NO: 9081 - DNA, 56 bp, Artificial Sequence; identical to SEQ ID NO: 5574
  Description of Artificial Sequence: Synthetic primer
  Description of Combined DNA/RNA Molecule: Synthetic primer

SEQ ID NO: 9082 - DNA, 41 bp, Artificial Sequence; identical to SEQ ID NO: 5584
  Description of Artificial Sequence: Synthetic primer
  Description of Combined DNA/RNA Molecule: Synthetic primer

SEQ ID NO: 9083 - DNA, 41 bp, Artificial Sequence; identical to SEQ ID NO: 5585
  Description of Artificial Sequence: Synthetic primer
  Description of Combined DNA/RNA Molecule: Synthetic primer

SEQ ID NO: 9084 - DNA, 61 bp, Artificial Sequence; identical to SEQ ID NO: 5586
  Description of Artificial Sequence: Synthetic primer
  Description of Combined DNA/RNA Molecule: Synthetic primer

SEQ ID NO: 9085 - DNA, 46 bp, Artificial Sequence; identical to SEQ ID NO: 5587
  Description of Artificial Sequence: Synthetic oligonucleotide
  Description of Combined DNA/RNA Molecule: Synthetic oligonucleotide

SEQ ID NO: 9086 - DNA, 50 bp, Artificial Sequence; identical to SEQ ID NO: 5588
  Description of Artificial Sequence: Synthetic oligonucleotide

SEQ ID NO: 9087 - DNA, 29 bp, Artificial Sequence
  Description of Artificial Sequence: Synthetic probe
ttccctacactggactggttcaagcttcc

SEQ ID NO: 9088 - DNA, 22 bp, Artificial Sequence
  Description of Artificial Sequence: Synthetic primer
tccaaacgattaggagcgtcaa

SEQ ID NO: 9089 - DNA, 21 bp, Artificial Sequence
  Description of Artificial Sequence: Synthetic primer
tgggcgtatacctctgtccaa

SEQ ID NO: 9090 - DNA, 53 bp, Artificial Sequence; identical to SEQ ID NO: 5592
  Description of Artificial Sequence: Synthetic primer
  Description of Combined DNA/RNA Molecule: Synthetic primer

SEQ ID NO: 9091 - DNA, 41 bp, Artificial Sequence; identical to SEQ ID NO: 5593
  Description of Artificial Sequence: Synthetic primer
  Description of Combined DNA/RNA Molecule: Synthetic primer

SEQ ID NO: 9092 - DNA, 38 bp, Artificial Sequence; identical to SEQ ID NO: 5594
  Description of Artificial Sequence: Synthetic primer
  Description of Combined DNA/RNA Molecule: Synthetic primer

SEQ ID NO: 9093 - DNA, 53 bp, Artificial Sequence; identical to SEQ ID NO: 5595
  Description of Artificial Sequence: Synthetic primer
  Description of Combined DNA/RNA Molecule: Synthetic primer

SEQ ID NO: 9094 - DNA, 46 bp, Artificial Sequence; identical to SEQ ID NO: 5596
  Description of Artificial Sequence: Synthetic oligonucleotide
  Description of Combined DNA/RNA Molecule: Synthetic oligonucleotide

SEQ ID NO: 9095 - DNA, 44 bp, Artificial Sequence; identical to SEQ ID NO: 5597
  Description of Artificial Sequence: Synthetic oligonucleotide

SEQ ID NO: 9096 - DNA, 23 bp, Artificial Sequence
  Description of Artificial Sequence: Synthetic probe
ttctccgcaccccagctccagtc

SEQ ID NO: 9097 - DNA, 22 bp, Artificial Sequence
  Description of Artificial Sequence: Synthetic primer
tccaaacgattaggagcgtcaa

SEQ ID NO: 9098 - DNA, 21 bp, Artificial Sequence
  Description of Artificial Sequence: Synthetic primer
tgggcgtatacctctgtccaa

SEQ ID NO: 9099 - DNA, 48 bp, Artificial Sequence; identical to SEQ ID NO: 5601
  Description of Artificial Sequence: Synthetic primer
  Description of Combined DNA/RNA Molecule: Synthetic primer

SEQ ID NO: 9100 - DNA, 46 bp, Artificial Sequence; identical to SEQ ID NO: 5611
  Description of Artificial Sequence: Synthetic primer
  Description of Combined DNA/RNA Molecule: Synthetic primer

SEQ ID NO: 9101 - DNA, 47 bp, Artificial Sequence; identical to SEQ ID NO: 5612
  Description of Artificial Sequence: Synthetic primer
  Description of Combined DNA/RNA Molecule: Synthetic primer

SEQ ID NO: 9102 - DNA, 49 bp, Artificial Sequence; identical to SEQ ID NO: 5613
  Description of Artificial Sequence: Synthetic primer
  Description of Combined DNA/RNA Molecule: Synthetic primer

SEQ ID NO: 9103 - DNA, 47 bp, Artificial Sequence; identical to SEQ ID NO: 5614
  Description of Artificial Sequence: Synthetic oligonucleotide
  Description of Combined DNA/RNA Molecule: Synthetic oligonucleotide

SEQ ID NO: 9104 - DNA, 46 bp, Artificial Sequence; identical to SEQ ID NO: 5615
  Description of Artificial Sequence: Synthetic oligonucleotide

SEQ ID NO: 9105 - DNA, 25 bp, Artificial Sequence
  Description of Artificial Sequence: Synthetic probe
aatatcgcaggtccacatggccacc

SEQ ID NO: 9106 - DNA, 19 bp, Artificial Sequence
  Description of Artificial Sequence: Synthetic primer
ttcgtgcgtcgtgtagcaa

SEQ ID NO: 9107 - DNA, 20 bp, Artificial Sequence
  Description of Artificial Sequence: Synthetic primer
tgggtgcagaaaatgggcaa

SEQ ID NO: 9108 - DNA, 45 bp, Artificial Sequence; identical to SEQ ID NO: 5619
  Description of Artificial Sequence: Synthetic primer
  Description of Combined DNA/RNA Molecule: Synthetic primer

SEQ ID NO: 9109 - DNA, 47 bp, Artificial Sequence; identical to SEQ ID NO: 5620
  Description of Artificial Sequence: Synthetic primer
  Description of Combined DNA/RNA Molecule: Synthetic primer

SEQ ID NO: 9110 - DNA, 46 bp, Artificial Sequence; identical to SEQ ID NO: 5621
  Description of Artificial Sequence: Synthetic primer
  Description of Combined DNA/RNA Molecule: Synthetic primer

SEQ ID NO: 9111 - DNA, 51 bp, Artificial Sequence; identical to SEQ ID NO: 5622
  Description of Artificial Sequence: Synthetic primer
  Description of Combined DNA/RNA Molecule: Synthetic primer

SEQ ID NO: 9112 - DNA, 47 bp, Artificial Sequence; identical to SEQ ID NO: 5623
  Description of Artificial Sequence: Synthetic oligonucleotide
  Description of Combined DNA/RNA Molecule: Synthetic oligonucleotide

SEQ ID NO: 9113 - DNA, 42 bp, Artificial Sequence; identical to SEQ ID NO: 5624
  Description of Artificial Sequence: Synthetic oligonucleotide

SEQ ID NO: 9114 - DNA, 23 bp, Artificial Sequence
  Description of Artificial Sequence: Synthetic probe
aactccgcacctgccagccagag

SEQ ID NO: 9115 - DNA, 19 bp, Artificial Sequence
  Description of Artificial Sequence: Synthetic primer
ttcgtgcgtcgtgtagcaa

SEQ ID NO: 9116 - DNA, 20 bp, Artificial Sequence
  Description of Artificial Sequence: Synthetic primer
tgggtgcagaaaatgggcaa

SEQ ID NO: 9117 - DNA, 49 bp, Artificial Sequence; identical to SEQ ID NO: 5628
  Description of Artificial Sequence: Synthetic primer
  Description of Combined DNA/RNA Molecule: Synthetic primer

SEQ ID NO: 9118 - DNA, 38 bp, Artificial Sequence; identical to SEQ ID NO: 5656
  Description of Artificial Sequence: Synthetic primer
  Description of Combined DNA/RNA Molecule: Synthetic primer

SEQ ID NO: 9119 - DNA, 41 bp, Artificial Sequence; identical to SEQ ID NO: 5657
  Description of Artificial Sequence: Synthetic primer
  Description of Combined DNA/RNA Molecule: Synthetic primer

SEQ ID NO: 9120 - DNA, 49 bp, Artificial Sequence; identical to SEQ ID NO: 5658
  Description of Artificial Sequence: Synthetic primer
  Description of Combined DNA/RNA Molecule: Synthetic primer

SEQ ID NO: 9121 - DNA, 48 bp, Artificial Sequence; identical to SEQ ID NO: 5659
  Description of Artificial Sequence: Synthetic oligonucleotide
  Description of Combined DNA/RNA Molecule: Synthetic oligonucleotide

SEQ ID NO: 9122 - DNA, 47 bp, Artificial Sequence; identical to SEQ ID NO: 5660
  Description of Artificial Sequence: Synthetic oligonucleotide

SEQ ID NO: 9123 - DNA, 26 bp, Artificial Sequence
  Description of Artificial Sequence: Synthetic probe
ttacacccagggtagcactccaggag

SEQ ID NO: 9124 - DNA, 21 bp, Artificial Sequence
  Description of Artificial Sequence: Synthetic primer
tgagcaaaatcttcgtcgacc

SEQ ID NO: 9125 - DNA, 20 bp, Artificial Sequence
  Description of Artificial Sequence: Synthetic primer
tgtacggaaggcatcgaacc

SEQ ID NO: 9126 - DNA, 48 bp, Artificial Sequence; identical to SEQ ID NO: 5664
  Description of Artificial Sequence: Synthetic primer
  Description of Combined DNA/RNA Molecule: Synthetic primer

SEQ ID NO: 9127 - DNA, 41 bp, Artificial Sequence; identical to SEQ ID NO: 5297
  Description of Artificial Sequence: Synthetic primer
  Description of Combined DNA/RNA Molecule: Synthetic primer

SEQ ID NO: 9128 - DNA, 43 bp, Artificial Sequence; identical to SEQ ID NO: 5684
  Description of Artificial Sequence: Synthetic primer
  Description of Combined DNA/RNA Molecule: Synthetic primer

SEQ ID NO: 9129 - DNA, 52 bp, Artificial Sequence; identical to SEQ ID NO: 5685
  Description of Artificial Sequence: Synthetic primer
  Description of Combined DNA/RNA Molecule: Synthetic primer

SEQ ID NO: 9130 - DNA, 48 bp, Artificial Sequence; identical to SEQ ID NO: 5686
  Description of Artificial Sequence: Synthetic oligonucleotide
  Description of Combined DNA/RNA Molecule: Synthetic oligonucleotide

SEQ ID NO: 9131 - DNA, 46 bp, Artificial Sequence; identical to SEQ ID NO: 5687
  Description of Artificial Sequence: Synthetic oligonucleotide

SEQ ID NO: 9132 - DNA, 23 bp, Artificial Sequence
  Description of Artificial Sequence: Synthetic probe
ccgaggtcaggagtcagcccacc

SEQ ID NO: 9133 - DNA, 22 bp, Artificial Sequence
  Description of Artificial Sequence: Synthetic primer
tgccctatcgaaaaggacaaca

SEQ ID NO: 9134 - DNA, 21 bp, Artificial Sequence
  Description of Artificial Sequence: Synthetic primer
tgtcatagacagccgcaaaca

SEQ ID NO: 9135 - DNA, 49 bp, Artificial Sequence; identical to SEQ ID NO: 5691
  Description of Artificial Sequence: Synthetic primer
  Description of Combined DNA/RNA Molecule: Synthetic primer

SEQ ID NO: 9136 - DNA, 44 bp, Artificial Sequence; identical to SEQ ID NO: 5701
  Description of Artificial Sequence: Synthetic primer
  Description of Combined DNA/RNA Molecule: Synthetic primer

SEQ ID NO: 9137 - DNA, 45 bp, Artificial Sequence; identical to SEQ ID NO: 5702
  Description of Artificial Sequence: Synthetic primer
  Description of Combined DNA/RNA Molecule: Synthetic primer

SEQ ID NO: 9138 - DNA, 54 bp, Artificial Sequence; identical to SEQ ID NO: 5703
  Description of Artificial Sequence: Synthetic primer
  Description of Combined DNA/RNA Molecule: Synthetic primer

SEQ ID NO: 9139 - DNA, 51 bp, Artificial Sequence; identical to SEQ ID NO: 5704
  Description of Artificial Sequence: Synthetic oligonucleotide
  Description of Combined DNA/RNA Molecule: Synthetic oligonucleotide

SEQ ID NO: 9140 - DNA, 46 bp, Artificial Sequence; identical to SEQ ID NO: 5705
  Description of Artificial Sequence: Synthetic oligonucleotide

SEQ ID NO: 9141 - DNA, 27 bp, Artificial Sequence
  Description of Artificial Sequence: Synthetic probe
ttatcaccatgtcacacacaggagcca

SEQ ID NO: 9142 - DNA, 19 bp, Artificial Sequence
  Description of Artificial Sequence: Synthetic primer
ttcgctgcccggttaaaca

SEQ ID NO: 9143 - DNA, 22 bp, Artificial Sequence
  Description of Artificial Sequence: Synthetic primer
tgtcgagctaggtccgataaca

SEQ ID NO: 9144 - DNA, 54 bp, Artificial Sequence; identical to SEQ ID NO: 5709
  Description of Artificial Sequence: Synthetic primer
  Description of Combined DNA/RNA Molecule: Synthetic primer

SEQ ID NO: 9145 - DNA, 52 bp, Artificial Sequence; identical to SEQ ID NO: 5800
  Description of Artificial Sequence: Synthetic primer
  Description of Combined DNA/RNA Molecule: Synthetic primer

SEQ ID NO: 9146 - DNA, 53 bp, Artificial Sequence; identical to SEQ ID NO: 5801
  Description of Artificial Sequence: Synthetic primer
  Description of Combined DNA/RNA Molecule: Synthetic primer

SEQ ID NO: 9147 - DNA, 46 bp, Artificial Sequence; identical to SEQ ID NO: 5802
  Description of Artificial Sequence: Synthetic oligonucleotide
  Description of Combined DNA/RNA Molecule: Synthetic oligonucleotide

SEQ ID NO: 9148 - DNA, 48 bp, Artificial Sequence; identical to SEQ ID NO: 5803
  Description of Artificial Sequence: Synthetic oligonucleotide

SEQ ID NO: 9149 - DNA, 27 bp, Artificial Sequence
  Description of Artificial Sequence: Synthetic probe
aacccaacaggcatttctgcagggacc

SEQ ID NO: 9150 - DNA, 20 bp, Artificial Sequence
  Description of Artificial Sequence: Synthetic primer
ttcttgcggttctggaacac

SEQ ID NO: 9151 - DNA, 21 bp, Artificial Sequence
  Description of Artificial Sequence: Synthetic primer
ttagcaacaacggagcatcac

SEQ ID NO: 9152 - DNA, 60 bp, Artificial Sequence; identical to SEQ ID NO: 5807
  Description of Artificial Sequence: Synthetic primer
  Description of Combined DNA/RNA Molecule: Synthetic primer

SEQ ID NO: 9153 - DNA, 39 bp, Artificial Sequence; identical to SEQ ID NO: 5817
  Description of Artificial Sequence: Synthetic primer
  Description of Combined DNA/RNA Molecule: Synthetic primer

SEQ ID NO: 9154 - DNA, 40 bp, Artificial Sequence; identical to SEQ ID NO: 5818
  Description of Artificial Sequence: Synthetic primer
  Description of Combined DNA/RNA Molecule: Synthetic primer

SEQ ID NO: 9155 - DNA, 54 bp, Artificial Sequence; identical to SEQ ID NO: 5819
  Description of Artificial Sequence: Synthetic primer
  Description of Combined DNA/RNA Molecule: Synthetic primer

SEQ ID NO: 9156 - DNA, 47 bp, Artificial Sequence; identical to SEQ ID NO: 5820
  Description of Artificial Sequence: Synthetic oligonucleotide
  Description of Combined DNA/RNA Molecule: Synthetic oligonucleotide

SEQ ID NO: 9157 - DNA, 42 bp, Artificial Sequence; identical to SEQ ID NO: 5821
  Description of Artificial Sequence: Synthetic oligonucleotide

SEQ ID NO: 9158 - DNA, 23 bp, Artificial Sequence
  Description of Artificial Sequence: Synthetic probe
aacaccgcaggaggccaaatccc

SEQ ID NO: 9159 - DNA, 19 bp, Artificial Sequence
  Description of Artificial Sequence: Synthetic primer
tcgcaacgtgccgaataca

SEQ ID NO: 9160 - DNA, 19 bp, Artificial Sequence
  Description of Artificial Sequence: Synthetic primer
ttagctcgaccgtgcaaca

SEQ ID NO: 9161 - DNA, 48 bp, Artificial Sequence; identical to SEQ ID NO: 5825
  Description of Artificial Sequence: Synthetic primer
  Description of Combined DNA/RNA Molecule: Synthetic primer

SEQ ID NO: 9162 - DNA, 41 bp, Artificial Sequence; identical to SEQ ID NO: 6003
  Description of Artificial Sequence: Synthetic primer
  Description of Combined DNA/RNA Molecule: Synthetic primer

SEQ ID NO: 9163 - DNA, 41 bp, Artificial Sequence; identical to SEQ ID NO: 6004
  Description of Artificial Sequence: Synthetic primer
  Description of Combined DNA/RNA Molecule: Synthetic primer

SEQ ID NO: 9164 - DNA, 57 bp, Artificial Sequence; identical to SEQ ID NO: 6005
  Description of Artificial Sequence: Synthetic primer
  Description of Combined DNA/RNA Molecule: Synthetic primer

SEQ ID NO: 9165 - DNA, 47 bp, Artificial Sequence; identical to SEQ ID NO: 6006
  Description of Artificial Sequence: Synthetic oligonucleotide
  Description of Combined DNA/RNA Molecule: Synthetic oligonucleotide

SEQ ID NO: 9166 - DNA, 41 bp, Artificial Sequence; identical to SEQ ID NO: 6007
  Description of Artificial Sequence: Synthetic oligonucleotide

SEQ ID NO: 9167 - DNA, 21 bp, Artificial Sequence
  Description of Artificial Sequence: Synthetic probe
ttcaggccaccaggagccaag

SEQ ID NO: 9168 - DNA, 19 bp, Artificial Sequence
  Description of Artificial Sequence: Synthetic primer
tccggatcaaagcagccac

SEQ ID NO: 9169 - DNA, 19 bp, Artificial Sequence
  Description of Artificial Sequence: Synthetic primer
tcaccgtacgccaacacac

SEQ ID NO: 9170 - DNA, 50 bp, Artificial Sequence; identical to SEQ ID NO: 6011
  Description of Artificial Sequence: Synthetic primer
  Description of Combined DNA/RNA Molecule: Synthetic primer

SEQ ID NO: 9171 - DNA, 48 bp, Artificial Sequence; identical to SEQ ID NO: 6012
  Description of Artificial Sequence: Synthetic primer
  Description of Combined DNA/RNA Molecule: Synthetic primer

SEQ ID NO: 9172 - DNA, 49 bp, Artificial Sequence; identical to SEQ ID NO: 6013
  Description of Artificial Sequence: Synthetic primer
  Description of Combined DNA/RNA Molecule: Synthetic primer

SEQ ID NO: 9173 - DNA, 53 bp, Artificial Sequence; identical to SEQ ID NO: 6014
  Description of Artificial Sequence: Synthetic primer
  Description of Combined DNA/RNA Molecule: Synthetic primer

SEQ ID NO: 9174 - DNA, 49 bp, Artificial Sequence; identical to SEQ ID NO: 6015
  Description of Artificial Sequence: Synthetic oligonucleotide
  Description of Combined DNA/RNA Molecule: Synthetic oligonucleotide

SEQ ID NO: 9175 - DNA, 51 bp, Artificial Sequence; identical to SEQ ID NO: 6016
  Description of Artificial Sequence: Synthetic oligonucleotide

SEQ ID NO: 9176 - DNA, 28 bp, Artificial Sequence
  Description of Artificial Sequence: Synthetic probe
ttccaggcaggacagtcaaccaaagcag

SEQ ID NO: 9177 - DNA, 21 bp, Artificial Sequence
  Description of Artificial Sequence: Synthetic primer
ttctagataccacggacgcac

SEQ ID NO: 9178 - DNA, 20 bp, Artificial Sequence
  Description of Artificial Sequence: Synthetic primer
tcagctttgcacaccaacac

SEQ ID NO: 9179 - DNA, 49 bp, Artificial Sequence; identical to SEQ ID NO: 6020
  Description of Artificial Sequence: Synthetic primer
  Description of Combined DNA/RNA Molecule: Synthetic primer

SEQ ID NO: 9180 - DNA, 42 bp, Artificial Sequence; identical to SEQ ID NO: 6021
  Description of Artificial Sequence: Synthetic primer
  Description of Combined DNA/RNA Molecule: Synthetic primer

SEQ ID NO: 9181 - DNA, 42 bp, Artificial Sequence; identical to SEQ ID NO: 6022
  Description of Artificial Sequence: Synthetic primer
  Description of Combined DNA/RNA Molecule: Synthetic primer

SEQ ID NO: 9182 - DNA, 57 bp, Artificial Sequence; identical to SEQ ID NO: 6023
  Description of Artificial Sequence: Synthetic primer
  Description of Combined DNA/RNA Molecule: Synthetic primer

SEQ ID NO: 9183 - DNA, 50 bp, Artificial Sequence; identical to SEQ ID NO: 6024
  Description of Artificial Sequence: Synthetic oligonucleotide
  Description of Combined DNA/RNA Molecule: Synthetic oligonucleotide

SEQ ID NO: 9184 - DNA, 55 bp, Artificial Sequence; identical to SEQ ID NO: 6025
  Description of Artificial Sequence: Synthetic oligonucleotide

SEQ ID NO: 9185 - DNA, 26 bp, Artificial Sequence
  Description of Artificial Sequence: Synthetic probe
ttagtcgcacatatcagcagccaccc

SEQ ID NO: 9186 - DNA, 20 bp, Artificial Sequence
  Description of Artificial Sequence: Synthetic primer
tatgcggaccgatgactcaa

SEQ ID NO: 9187 - DNA, 22 bp, Artificial Sequence
  Description of Artificial Sequence: Synthetic primer
tcaggtagatcaagccaagcaa

SEQ ID NO: 9188 - DNA, 57 bp, Artificial Sequence; identical to SEQ ID NO: 6029
  Description of Artificial Sequence: Synthetic primer
  Description of Combined DNA/RNA Molecule: Synthetic primer

SEQ ID NO: 9189 - DNA, 40 bp, Artificial Sequence; identical to SEQ ID NO: 6272
  Description of Artificial Sequence: Synthetic primer
  Description of Combined DNA/RNA Molecule: Synthetic primer

SEQ ID NO: 9190 - DNA, 42 bp, Artificial Sequence; identical to SEQ ID NO: 6273
  Description of Artificial Sequence: Synthetic primer
  Description of Combined DNA/RNA Molecule: Synthetic primer

SEQ ID NO: 9191 - DNA, 48 bp, Artificial Sequence; identical to SEQ ID NO: 6274
  Description of Artificial Sequence: Synthetic primer
  Description of Combined DNA/RNA Molecule: Synthetic primer

SEQ ID NO: 9192 - DNA, 46 bp, Artificial Sequence; identical to SEQ ID NO: 6275
  Description of Artificial Sequence: Synthetic oligonucleotide
  Description of Combined DNA/RNA Molecule: Synthetic oligonucleotide

SEQ ID NO: 9193 - DNA, 48 bp, Artificial Sequence; identical to SEQ ID NO: 6276
  Description of Artificial Sequence: Synthetic oligonucleotide

SEQ ID NO: 9194 - DNA, 29 bp, Artificial Sequence
  Description of Artificial Sequence: Synthetic probe
aactgctcacccaccattcagttcagcat

SEQ ID NO: 9195 - DNA, 21 bp, Artificial Sequence
  Description of Artificial Sequence: Synthetic primer
tcatcgccctcagatcttcca

SEQ ID NO: 9196 - DNA, 21 bp, Artificial Sequence
  Description of Artificial Sequence: Synthetic primer
tgccctccaatctatcctcca

SEQ ID NO: 9197 - DNA, 45 bp, Artificial Sequence; identical to SEQ ID NO: 6280
  Description of Artificial Sequence: Synthetic primer
  Description of Combined DNA/RNA Molecule: Synthetic primer

SEQ ID NO: 9198 - DNA, 45 bp, Artificial Sequence; identical to SEQ ID NO: 128
  Description of Artificial Sequence: Synthetic primer
  Description of Combined DNA/RNA Molecule: Synthetic primer

SEQ ID NO: 9199 - DNA, 42 bp, Artificial Sequence; identical to SEQ ID NO: 6380
  Description of Artificial Sequence: Synthetic primer
  Description of Combined DNA/RNA Molecule: Synthetic primer

SEQ ID NO: 9200 - DNA, 52 bp, Artificial Sequence; identical to SEQ ID NO: 6381
  Description of Artificial Sequence: Synthetic primer
  Description of Combined DNA/RNA Molecule: Synthetic primer

SEQ ID NO: 9201 - DNA, 50 bp, Artificial Sequence; identical to SEQ ID NO: 6382
  Description of Artificial Sequence: Synthetic oligonucleotide
  Description of Combined DNA/RNA Molecule: Synthetic oligonucleotide

SEQ ID NO: 9202 - DNA, 43 bp, Artificial Sequence; identical to SEQ ID NO: 6383
  Description of Artificial Sequence: Synthetic oligonucleotide

SEQ ID NO: 9203 - DNA, 24 bp, Artificial Sequence
  Description of Artificial Sequence: Synthetic probe
ttactgccagcacaggagcaggag

SEQ ID NO: 9204 - DNA, 21 bp, Artificial Sequence
  Description of Artificial Sequence: Synthetic primer
tcgacgaatctgctcagacaa

SEQ ID NO: 9205 - DNA, 19 bp, Artificial Sequence
  Description of Artificial Sequence: Synthetic primer
tgctcagacgctgcttcaa

SEQ ID NO: 9206 - DNA, 45 bp, Artificial Sequence; identical to SEQ ID NO: 6387
  Description of Artificial Sequence: Synthetic primer
  Description of Combined DNA/RNA Molecule: Synthetic primer

SEQ ID NO: 9207 - DNA, 41 bp, Artificial Sequence; identical to SEQ ID NO: 8166
  Description of Artificial Sequence: Synthetic primer
  Description of Combined DNA/RNA Molecule: Synthetic primer

SEQ ID NO: 9208 - DNA, 39 bp, Artificial Sequence; identical to SEQ ID NO: 8167
  Description of Artificial Sequence: Synthetic primer
  Description of Combined DNA/RNA Molecule: Synthetic primer

SEQ ID NO: 9209 - DNA, 50 bp, Artificial Sequence; identical to SEQ ID NO: 8168
  Description of Artificial Sequence: Synthetic primer
  Description of Combined DNA/RNA Molecule: Synthetic primer

SEQ ID NO: 9210 - DNA, 51 bp, Artificial Sequence; identical to SEQ ID NO: 8169
  Description of Artificial Sequence: Synthetic oligonucleotide
  Description of Combined DNA/RNA Molecule: Synthetic oligonucleotide

SEQ ID NO: 9211 - DNA, 54 bp, Artificial Sequence; identical to SEQ ID NO: 8170
  Description of Artificial Sequence: Synthetic oligonucleotide

SEQ ID NO: 9212 - DNA, 34 bp, Artificial Sequence; identical to SEQ ID NO: 8171
  Description of Artificial Sequence: Synthetic probe

SEQ ID NO: 9213 - DNA, 22 bp, Artificial Sequence
  Description of Artificial Sequence: Synthetic primer
tggataaactaagtccgcccac

SEQ ID NO: 9214 - DNA, 21 bp, Artificial Sequence
  Description of Artificial Sequence: Synthetic primer
tgttagacgtcgctcagtcac

SEQ ID NO: 9215 - DNA, 47 bp, Artificial Sequence; identical to SEQ ID NO: 8174
  Description of Artificial Sequence: Synthetic primer
  Description of Combined DNA/RNA Molecule: Synthetic primer

SEQ ID NO: 9216 - DNA, 39 bp, Artificial Sequence; identical to SEQ ID NO: 8193
  Description of Artificial Sequence: Synthetic primer
  Description of Combined DNA/RNA Molecule: Synthetic primer

SEQ ID NO: 9217 - DNA, 40 bp, Artificial Sequence; identical to SEQ ID NO: 8194
  Description of Artificial Sequence: Synthetic primer
  Description of Combined DNA/RNA Molecule: Synthetic primer

SEQ ID NO: 9218 - DNA, 56 bp, Artificial Sequence; identical to SEQ ID NO: 8195
  Description of Artificial Sequence: Synthetic primer
  Description of Combined DNA/RNA Molecule: Synthetic primer

SEQ ID NO: 9219 - DNA, 45 bp, Artificial Sequence; identical to SEQ ID NO: 8196
  Description of Artificial Sequence: Synthetic oligonucleotide
  Description of Combined DNA/RNA Molecule: Synthetic oligonucleotide

SEQ ID NO: 9220 - DNA, 53 bp, Artificial Sequence; identical to SEQ ID NO: 8197
  Description of Artificial Sequence: Synthetic oligonucleotide

SEQ ID NO: 9221 - DNA, 29 bp, Artificial Sequence
  Description of Artificial Sequence: Synthetic probe
tttcagacaccaagcactgtgcaatccac

SEQ ID NO: 9222 - DNA, 22 bp, Artificial Sequence
  Description of Artificial Sequence: Synthetic primer
tatggtaaaatgtcagcggcac

SEQ ID NO: 9223 - DNA, 21 bp, Artificial Sequence
  Description of Artificial Sequence: Synthetic primer
ttagcaacaacggagcatcac

SEQ ID NO: 9224 - DNA, 51 bp, Artificial Sequence; identical to SEQ ID NO: 8201
  Description of Artificial Sequence: Synthetic primer
  Description of Combined DNA/RNA Molecule: Synthetic primer

SEQ ID NO: 9225 - DNA, 40 bp, Artificial Sequence; identical to SEQ ID NO: 8609
  Description of Artificial Sequence: Synthetic primer
  Description of Combined DNA/RNA Molecule: Synthetic primer

SEQ ID NO: 9226 - DNA, 43 bp, Artificial Sequence; identical to SEQ ID NO: 8610
  Description of Artificial Sequence: Synthetic primer
  Description of Combined DNA/RNA Molecule: Synthetic primer

SEQ ID NO: 9227 - DNA, 59 bp, Artificial Sequence; identical to SEQ ID NO: 8611
  Description of Artificial Sequence: Synthetic primer
  Description of Combined DNA/RNA Molecule: Synthetic primer

SEQ ID NO: 9228 - DNA, 43 bp, Artificial Sequence; identical to SEQ ID NO: 8612
  Description of Artificial Sequence: Synthetic oligonucleotide
  Description of Combined DNA/RNA Molecule: Synthetic oligonucleotide

SEQ ID NO: 9229 - DNA, 53 bp, Artificial Sequence; identical to SEQ ID NO: 8613
  Description of Artificial Sequence: Synthetic oligonucleotide

SEQ ID NO: 9230 - DNA, 35 bp, Artificial Sequence; identical to SEQ ID NO: 8614
  Description of Artificial Sequence: Synthetic probe

SEQ ID NO: 9231 - DNA, 19 bp, Artificial Sequence
  Description of Artificial Sequence: Synthetic primer
tcctcgagccgatgacaca

SEQ ID NO: 9232 - DNA, 19 bp, Artificial Sequence
  Description of Artificial Sequence: Synthetic primer
ttagcccacggacgttaca

SEQ ID NO: 9233 - DNA, 48 bp, Artificial Sequence; identical to SEQ ID NO: 8617
  Description of Artificial Sequence: Synthetic primer
  Description of Combined DNA/RNA Molecule: Synthetic primer

SEQ ID NO: 9234 - DNA, 39 bp, Artificial Sequence; identical to SEQ ID NO: 8618
  Description of Artificial Sequence: Synthetic primer
  Description of Combined DNA/RNA Molecule: Synthetic primer

SEQ ID NO: 9235 - DNA, 38 bp, Artificial Sequence; identical to SEQ ID NO: 8619
  Description of Artificial Sequence: Synthetic primer
  Description of Combined DNA/RNA Molecule: Synthetic primer

SEQ ID NO: 9236 - DNA, 49 bp, Artificial Sequence; identical to SEQ ID NO: 8620
  Description of Artificial Sequence: Synthetic primer
  Description of Combined DNA/RNA Molecule: Synthetic primer

SEQ ID NO: 9237 - DNA, 54 bp, Artificial Sequence; identical to SEQ ID NO: 8621
  Description of Artificial Sequence: Synthetic oligonucleotide
  Description of Combined DNA/RNA Molecule: Synthetic oligonucleotide

SEQ ID NO: 9238 - DNA, 44 bp, Artificial Sequence; identical to SEQ ID NO: 8622
  Description of Artificial Sequence: Synthetic oligonucleotide

SEQ ID NO: 9239 - DNA, 26 bp, Artificial Sequence
  Description of Artificial Sequence: Synthetic probe
aatccagcatgctgcagttcccacac

SEQ ID NO: 9240 - DNA, 21 bp, Artificial Sequence
  Description of Artificial Sequence: Synthetic primer
tactatcgtatcacgccgaca

SEQ ID NO: 9241 - DNA, 19 bp, Artificial Sequence
  Description of Artificial Sequence: Synthetic primer
ttagcccacggacgttaca

SEQ ID NO: 9242 - DNA, 47 bp, Artificial Sequence; identical to SEQ ID NO: 8626
  Description of Artificial Sequence: Synthetic primer
  Description of Combined DNA/RNA Molecule: Synthetic primer

SEQ ID NO: 9243 - DNA, 42 bp, Artificial Sequence
  Description of Artificial Sequence: Synthetic primer
  Description of Combined DNA/RNA Molecule: Synthetic primer
acgacgacgacgaacaggtgtggttccagaaccagcacatgg

SEQ ID NO: 9244 - DNA, 44 bp, Artificial Sequence
  Description of Artificial Sequence: Synthetic primer
  Description of Combined DNA/RNA Molecule: Synthetic primer
acgacgacgacgaatgtggttccagaaccagcacatgaaggacg

SEQ ID NO: 9245 - DNA, 48 bp, Artificial Sequence
  Description of Artificial Sequence: Synthetic primer
  Description of Combined DNA/RNA Molecule: Synthetic primer
acgacgacgacttgacgaacataatctgcctgtggctgctgcauggcc

SEQ ID NO: 9246 - DNA, 46 bp, Artificial Sequence
  Description of Artificial Sequence: Synthetic oligonucleotide
  Description of Combined DNA/RNA Molecule: Synthetic oligonucleotide
tcactatcggcgtagtcaccaagcagcacctggccatggcauggtt

SEQ ID NO: 9247 - DNA, 41 bp, Artificial Sequence
  Description of Artificial Sequence: Synthetic oligonucleotide
tggccacacccagcagacccctggtgactttacccggagga

SEQ ID NO: 9248 - DNA, 23 bp, Artificial Sequence
  Description of Artificial Sequence: Synthetic probe
ttcatggcatggccacacccagc

SEQ ID NO: 9249 - DNA, 21 bp, Artificial Sequence
  Description of Artificial Sequence: Synthetic primer
tcactatcggcgtagtcacca

SEQ ID NO: 9250 - DNA, 20 bp, Artificial Sequence
  Description of Artificial Sequence: Synthetic primer
tcctccgggtaaagtcacca

SEQ ID NO: 9251 - DNA, 55 bp, Artificial Sequence
  Description of Artificial Sequence: Synthetic primer
  Description of Combined DNA/RNA Molecule: Synthetic primer
tcctccgggtaaagtcaccatgcatggctcatcatgtaagtgtagaagatgggac

SEQ ID NO: 9252 - DNA, 40 bp, Artificial Sequence
  Description of Artificial Sequence: Synthetic primer
  Description of Combined DNA/RNA Molecule: Synthetic primer
acgacgacgacgaagaagggtggcagatggagccaccctt

SEQ ID NO: 9253 - DNA, 38 bp, Artificial Sequence
  Description of Artificial Sequence: Synthetic primer
  Description of Combined DNA/RNA Molecule: Synthetic primer
acgacgacgacgaagtggcagatggagccacccuctct

SEQ ID NO: 9254 - DNA, 55 bp, Artificial Sequence
  Description of Artificial Sequence: Synthetic primer
  Description of Combined DNA/RNA Molecule: Synthetic primer
acgacgacgacttgacgaacataatgtgggaaacttgggctcatagtgccuctac

SEQ ID NO: 9255 - DNA, 48 bp, Artificial Sequence
  Description of Artificial Sequence: Synthetic oligonucleotide
  Description of Combined DNA/RNA Molecule: Synthetic oligonucleotide
tcatctgttcgtcagggtccagaggcactttccagtgaagacaccacg

SEQ ID NO: 9256 - DNA, 53 bp, Artificial Sequence
  Description of Artificial Sequence: Synthetic oligonucleotide
ccataggaaacaccagtctgtgccacagtgtactggtgactttacccggagga

SEQ ID NO: 9257 - DNA, 33 bp, Artificial Sequence
  Description of Artificial Sequence: Synthetic probe
aagaagacaccataggaaacaccagtctgtgcc

SEQ ID NO: 9258 - DNA, 21 bp, Artificial Sequence
  Description of Artificial Sequence: Synthetic primer
tcatctgttcgtcagggtcca

SEQ ID NO: 9259 - DNA, 20 bp, Artificial Sequence
  Description of Artificial Sequence: Synthetic primer
tcctccgggtaaagtcacca

SEQ ID NO: 9260 - DNA, 52 bp, Artificial Sequence
  Description of Artificial Sequence: Synthetic primer
  Description of Combined DNA/RNA Molecule: Synthetic primer
tcctccgggtaaagtcaccaggaaacttgggctcatagtgcctctgtgtacg

SEQ ID NO: 9261 - DNA, 42 bp, Artificial Sequence
  Description of Artificial Sequence: Synthetic primer
  Description of Combined DNA/RNA Molecule: Synthetic primer
acgacgacgacgaacacacaggcctgttctatgggcaagcta

SEQ ID NO: 9262 - DNA, 40 bp, Artificial Sequence
  Description of Artificial Sequence: Synthetic primer
  Description of Combined DNA/RNA Molecule: Synthetic primer
acgacgacgacgaaagccacaccatcacacaggccugttt

SEQ ID NO: 9263 - DNA, 48 bp, Artificial Sequence
  Description of Artificial Sequence: Synthetic primer
  Description of Combined DNA/RNA Molecule: Synthetic primer
acgacgacgacttgacgaacataatggtgctgggcaggctggagggtc

SEQ ID NO: 9264 - DNA, 44 bp, Artificial Sequence
  Description of Artificial Sequence: Synthetic oligonucleotide
  Description of Combined DNA/RNA Molecule: Synthetic oligonucleotide
tctacagctagatgcggccagcagtgcagctgccagacaccctg

SEQ ID NO: 9265 - DNA, 39 bp, Artificial Sequence
  Description of Artificial Sequence: Synthetic oligonucleotide
ccccacaggcaggcccctctggctccgttactctgtcga

SEQ ID NO: 9266 - DNA, 22 bp, Artificial Sequence
  Description of Artificial Sequence: Synthetic probe
aaccagacaccccacaggcagg

SEQ ID NO: 9267 - DNA, 20 bp, Artificial Sequence
  Description of Artificial Sequence: Synthetic primer
tctacagctagatgcggcca

SEQ ID NO: 9268 - DNA, 20 bp, Artificial Sequence
  Description of Artificial Sequence: Synthetic primer
tcgacagagtaacggagcca

SEQ ID NO: 9269 - DNA, 42 bp, Artificial Sequence
  Description of Artificial Sequence: Synthetic primer
  Description of Combined DNA/RNA Molecule: Synthetic primer
tcgacagagtaacggagccagggcaggctggagggttgggag

SEQ ID NO: 9270 - DNA, 41 bp, Artificial Sequence
  Description of Artificial Sequence: Synthetic primer
  Description of Combined DNA/RNA Molecule: Synthetic primer
acgacgacgacgaacacaccatcagcaccatccccactgga

SEQ ID NO: 9271 - DNA, 43 bp, Artificial Sequence
  Description of Artificial Sequence: Synthetic primer
  Description of Combined DNA/RNA Molecule: Synthetic primer
acgacgacgacgaagaccaacacaccatcagcaccatccccat

SEQ ID NO: 9272 - DNA, 50 bp, Artificial Sequence
  Description of Artificial Sequence: Synthetic primer
  Description of Combined DNA/RNA Molecule: Synthetic primer
acgacgacgacttgacgaacataattggcctgccacaggtgcttcctgag

SEQ ID NO: 9273 - DNA, 47 bp, Artificial Sequence
  Description of Artificial Sequence: Synthetic oligonucleotide
  Description of Combined DNA/RNA Molecule: Synthetic oligonucleotide
tagcgatagtaccgacagtcacgccacagcagcaggttctcacacct

SEQ ID NO: 9274 - DNA, 49 bp, Artificial Sequence
  Description of Artificial Sequence: Synthetic oligonucleotide
cactcagggtagcactccaggagcagttggtgcggaaacctatcgtcga

SEQ ID NO: 9275 - DNA, 30 bp, Artificial Sequence
  Description of Artificial Sequence: Synthetic probe
ttgttctcacactcagggtagcactccagg

SEQ ID NO: 9276 - DNA, 22 bp, Artificial Sequence
  Description of Artificial Sequence: Synthetic primer
tagcgatagtaccgacagtcac

SEQ ID NO: 9277 - DNA, 20 bp, Artificial Sequence
  Description of Artificial Sequence: Synthetic primer
tcgacgataggtttccgcac

SEQ ID NO: 9278 - DNA, 48 bp, Artificial Sequence
  Description of Artificial Sequence: Synthetic primer
  Description of Combined DNA/RNA Molecule: Synthetic primer
tcgacgataggtttccgcaccaggtgcttcctgaaggtgagttggcta

SEQ ID NO: 9279 - DNA, 38 bp, Artificial Sequence
  Description of Artificial Sequence: Synthetic primer
  Description of Combined DNA/RNA Molecule: Synthetic primer
acgacgacgacgaaggcagcaggacaccccacacaggt

SEQ ID NO: 9280 - DNA, 39 bp, Artificial Sequence
  Description of Artificial Sequence: Synthetic primer
  Description of Combined DNA/RNA Molecule: Synthetic primer
acgacgacgacgaagcaggacaccccacacaggccaacg

SEQ ID NO: 9281 - DNA, 52 bp, Artificial Sequence
  Description of Artificial Sequence: Synthetic primer
  Description of Combined DNA/RNA Molecule: Synthetic primer
acgacgacgacttgacgaacataataacatcctgatggtggcctgcaggcta

SEQ ID NO: 9282 - DNA, 45 bp, Artificial Sequence
  Description of Artificial Sequence: Synthetic oligonucleotide
  Description of Combined DNA/RNA Molecule: Synthetic oligonucleotide
tccagggtatttggcgcacgagaggagccactcactctcactttt

SEQ ID NO: 9283 - DNA, 56 bp, Artificial Sequence
  Description of Artificial Sequence: Synthetic oligonucleotide
cttccacattttcattcaacttcctgggcctaaagcgtgcggaaacctatcgtcga

SEQ ID NO: 9284 - DNA, 35 bp, Artificial Sequence
  Description of Artificial Sequence: Synthetic probe
aaactctcacttccacattttcattcaacttcctg

SEQ ID NO: 9285 - DNA, 19 bp, Artificial Sequence
  Description of Artificial Sequence: Synthetic primer
tccagggtatttggcgcac

SEQ ID NO: 9286 - DNA, 20 bp, Artificial Sequence
  Description of Artificial Sequence: Synthetic primer
tcgacgataggtttccgcac

SEQ ID NO: 9287 - DNA, 44 bp, Artificial Sequence
  Description of Artificial Sequence: Synthetic primer
  Description of Combined DNA/RNA Molecule: Synthetic primer
tcgacgataggtttccgcacctgcaggctgctggaggatgcttc

SEQ ID NO: 9288 - DNA, 42 bp, Artificial Sequence
  Description of Artificial Sequence: Synthetic primer
  Description of Combined DNA/RNA Molecule: Synthetic primer
acgacgacgacgaaggctgctctggttcagcagttcaugccg

SEQ ID NO: 9289 - DNA, 40 bp, Artificial Sequence
  Description of Artificial Sequence: Synthetic primer
  Description of Combined DNA/RNA Molecule: Synthetic primer
acgacgacgacgaagggctgctctggttcagcagtucata

SEQ ID NO: 9290 - DNA, 54 bp, Artificial Sequence
  Description of Artificial Sequence: Synthetic primer
  Description of Combined DNA/RNA Molecule: Synthetic primer
acgacgacgacttgacgaacataatggcctgaagtgtgtagtcccctgagccat

SEQ ID NO: 9291 - DNA, 49 bp, Artificial Sequence
  Description of Artificial Sequence: Synthetic oligonucleotide
  Description of Combined DNA/RNA Molecule: Synthetic oligonucleotide
tcataatgttgtcagcccgaccgccatcaacccaagctgcaacaugcga

SEQ ID NO: 9292 - DNA, 47 bp, Artificial Sequence
  Description of Artificial Sequence: Synthetic oligonucleotide
tgcagaagaccagcaggagagtgcagtgggtcttggtgatggagcga

SEQ ID NO: 9293 - DNA, 28 bp, Artificial Sequence
  Description of Artificial Sequence: Synthetic probe
tttgcaacatgcagaagaccagcaggag

SEQ ID NO: 9294 - DNA, 22 bp, Artificial Sequence
  Description of Artificial Sequence: Synthetic primer
tcataatgttgtcagcccgacc

SEQ ID NO: 9295 - DNA, 19 bp, Artificial Sequence
  Description of Artificial Sequence: Synthetic primer
tcgctccatcaccaagacc

SEQ ID NO: 9296 - DNA, 48 bp, Artificial Sequence
  Description of Artificial Sequence: Synthetic primer
  Description of Combined DNA/RNA Molecule: Synthetic primer
tcgctccatcaccaagaccaagtgtgtagtcccctgagccattgcacc

SEQ ID NO: 9297 - DNA, 39 bp, Artificial Sequence
  Description of Artificial Sequence: Synthetic primer
  Description of Combined DNA/RNA Molecule: Synthetic primer
acgacgacgacgaagacaccaggcaacccacccactact

SEQ ID NO: 9298 - DNA, 40 bp, Artificial Sequence
  Description of Artificial Sequence: Synthetic primer
  Description of Combined DNA/RNA Molecule: Synthetic primer
acgacgacgacgaaccaggcaacccacccactaccctttt

SEQ ID NO: 9299 - DNA, 50 bp, Artificial Sequence
  Description of Artificial Sequence: Synthetic primer
  Description of Combined DNA/RNA Molecule: Synthetic primer
acgacgacgacttgacgaacataatgccctgaggctgggcttgaagggat

SEQ ID NO: 9300 - DNA, 52 bp, Artificial Sequence
  Description of Artificial Sequence: Synthetic oligonucleotide
  Description of Combined DNA/RNA Molecule: Synthetic oligonucleotide
tacgaatcacccgagagttcaattcagctcaactctggagggctgcactgtc

SEQ ID NO: 9301 - DNA, 44 bp, Artificial Sequence
  Description of Artificial Sequence: Synthetic oligonucleotide
ctgctccatcccccaccaccccttgtgggtgggtataggtcaga

SEQ ID NO: 9302 - DNA, 22 bp, Artificial Sequence
  Description of Artificial Sequence: Synthetic probe
ttggctgcactgctccatcccc

SEQ ID NO: 9303 - DNA, 22 bp, Artificial Sequence
  Description of Artificial Sequence: Synthetic primer
tacgaatcacccgagagttcaa

SEQ ID NO: 9304 - DNA, 22 bp, Artificial Sequence
  Description of Artificial Sequence: Synthetic primer
tctgacctatacccacccacaa

SEQ ID NO: 9305 - DNA, 47 bp, Artificial Sequence
  Description of Artificial Sequence: Synthetic primer
  Description of Combined DNA/RNA Molecule: Synthetic primer
tctgacctatacccacccacaatgaagggaccctgaggtgatgggaa

SEQ ID NO: 9306 - DNA, 42 bp, Artificial Sequence; identical to SEQ ID NO: 119
  Description of Artificial Sequence: Synthetic primer
  Description of Combined DNA/RNA Molecule: Synthetic primer

SEQ ID NO: 9307 - DNA, 40 bp, Artificial Sequence; identical to SEQ ID NO: 120
  Description of Artificial Sequence: Synthetic primer
  Description of Combined DNA/RNA Molecule: Synthetic primer

SEQ ID NO: 9308 - DNA, 48 bp, Artificial Sequence; identical to SEQ ID NO: 1298
  Description of Artificial Sequence: Synthetic primer
  Description of Combined DNA/RNA Molecule: Synthetic primer

SEQ ID NO: 9309 - DNA, 45 bp, Artificial Sequence; identical to SEQ ID NO: 1299
  Description of Artificial Sequence: Synthetic oligonucleotide
  Description of Combined DNA/RNA Molecule: Synthetic oligonucleotide

SEQ ID NO: 9310 - DNA, 49 bp, Artificial Sequence; identical to SEQ ID NO: 1300
  Description of Artificial Sequence: Synthetic oligonucleotide

SEQ ID NO: 9311 - DNA, 30 bp, Artificial Sequence; identical to SEQ ID NO: 1301
  Description of Artificial Sequence: Synthetic probe

SEQ ID NO: 9312 - DNA, 19 bp, Artificial Sequence
  Description of Artificial Sequence: Synthetic primer
tcgcaccggaattctgacc

SEQ ID NO: 9313 - DNA, 20 bp, Artificial Sequence
  Description of Artificial Sequence: Synthetic primer
tgccgtcatgggaaactacc

SEQ ID NO: 9314 - DNA, 44 bp, Artificial Sequence; identical to SEQ ID NO: 1304
  Description of Artificial Sequence: Synthetic primer
  Description of Combined DNA/RNA Molecule: Synthetic primer

SEQ ID NO: 9315 - DNA, 25 bp, Artificial Sequence
  Description of Artificial Sequence: Synthetic primer
  Description of Combined DNA/RNA Molecule: Synthetic primer
acgacgacgacttgacgaacataac

SEQ ID NO: 9316 - DNA, 39 bp, Artificial Sequence; identical to SEQ ID NO: 1604
  Description of Artificial Sequence: Synthetic primer
  Description of Combined DNA/RNA Molecule: Synthetic primer

SEQ ID NO: 9317 - DNA, 39 bp, Artificial Sequence; identical to SEQ ID NO: 1605
  Description of Artificial Sequence: Synthetic primer
  Description of Combined DNA/RNA Molecule: Synthetic primer

SEQ ID NO: 9318 - DNA, 48 bp, Artificial Sequence; identical to SEQ ID NO: 1606
  Description of Artificial Sequence: Synthetic primer
  Description of Combined DNA/RNA Molecule: Synthetic primer

SEQ ID NO: 9319 - DNA, 47 bp, Artificial Sequence; identical to SEQ ID NO: 1607
  Description of Artificial Sequence: Synthetic oligonucleotide
  Description of Combined DNA/RNA Molecule: Synthetic oligonucleotide

SEQ ID NO: 9320 - DNA, 46 bp, Artificial Sequence; identical to SEQ ID NO: 1608
  Description of Artificial Sequence: Synthetic oligonucleotide

SEQ ID NO: 9321 - DNA, 28 bp, Artificial Sequence
  Description of Artificial Sequence: Synthetic probe
aattcctcatccctccacacacaccctg

SEQ ID NO: 9322 - DNA, 21 bp, Artificial Sequence
  Description of Artificial Sequence: Synthetic primer
tcacagagacttgccgatcac

SEQ ID NO: 9323 - DNA, 22 bp, Artificial Sequence
  Description of Artificial Sequence: Synthetic primer
tggccatgtctaagctacacac

SEQ ID NO: 9324 - DNA, 46 bp, Artificial Sequence; identical to SEQ ID NO: 1612
  Description of Artificial Sequence: Synthetic primer
  Description of Combined DNA/RNA Molecule: Synthetic primer

SEQ ID NO: 9325 - DNA, 45 bp, Artificial Sequence; identical to SEQ ID NO: 1629
  Description of Artificial Sequence: Synthetic primer
  Description of Combined DNA/RNA Molecule: Synthetic primer

SEQ ID NO: 9326 - DNA, 41 bp, Artificial Sequence; identical to SEQ ID NO: 1630
  Description of Artificial Sequence: Synthetic primer
  Description of Combined DNA/RNA Molecule: Synthetic primer

SEQ ID NO: 9327 - DNA, 53 bp, Artificial Sequence; identical to SEQ ID NO: 1631
  Description of Artificial Sequence: Synthetic primer
  Description of Combined DNA/RNA Molecule: Synthetic primer

SEQ ID NO: 9328 - DNA, 53 bp, Artificial Sequence; identical to SEQ ID NO: 1632
  Description of Artificial Sequence: Synthetic oligonucleotide
  Description of Combined DNA/RNA Molecule: Synthetic oligonucleotide

SEQ ID NO: 9329 - DNA, 47 bp, Artificial Sequence; identical to SEQ ID NO: 1633
  Description of Artificial Sequence: Synthetic oligonucleotide

SEQ ID NO: 9330 - DNA, 21 bp, Artificial Sequence
  Description of Artificial Sequence: Synthetic probe
tttggcccaggctcacccctg

SEQ ID NO: 9331 - DNA, 22 bp, Artificial Sequence
  Description of Artificial Sequence: Synthetic primer
tgatgctggcaaaccctagaac

SEQ ID NO: 9332 - DNA, 20 bp, Artificial Sequence
  Description of Artificial Sequence: Synthetic primer
tggcctaacggtgatggaac

SEQ ID NO: 9333 - DNA, 51 bp, Artificial Sequence; identical to SEQ ID NO: 1637
  Description of Artificial Sequence: Synthetic primer
  Description of Combined DNA/RNA Molecule: Synthetic primer

SEQ ID NO: 9334 - DNA, 43 bp, Artificial Sequence; identical to SEQ ID NO: 4804
  Description of Artificial Sequence: Synthetic primer
  Description of Combined DNA/RNA Molecule: Synthetic primer

SEQ ID NO: 9335 - DNA, 45 bp, Artificial Sequence; identical to SEQ ID NO: 4805
  Description of Artificial Sequence: Synthetic primer
  Description of Combined DNA/RNA Molecule: Synthetic primer

SEQ ID NO: 9336 - DNA, 58 bp, Artificial Sequence; identical to SEQ ID NO: 4806
  Description of Artificial Sequence: Synthetic primer
  Description of Combined DNA/RNA Molecule: Synthetic primer

SEQ ID NO: 9337 - DNA, 53 bp, Artificial Sequence; identical to SEQ ID NO: 4807
  Description of Artificial Sequence: Synthetic oligonucleotide
  Description of Combined DNA/RNA Molecule: Synthetic oligonucleotide

SEQ ID NO: 9338 - DNA, 50 bp, Artificial Sequence; identical to SEQ ID NO: 4808
  Description of Artificial Sequence: Synthetic oligonucleotide

SEQ ID NO: 9339 - DNA, 31 bp, Artificial Sequence; identical to SEQ ID NO: 4809
  Description of Artificial Sequence: Synthetic probe

SEQ ID NO: 9340 - DNA, 19 bp, Artificial Sequence
  Description of Artificial Sequence: Synthetic primer
ttcgtccctgcacgctaac

SEQ ID NO: 9341 - DNA, 20 bp, Artificial Sequence
  Description of Artificial Sequence: Synthetic primer
tggcctaacggtgatggaac

SEQ ID NO: 9342 - DNA, 47 bp, Artificial Sequence; identical to SEQ ID NO: 4812
  Description of Artificial Sequence: Synthetic primer
  Description of Combined DNA/RNA Molecule: Synthetic primer

SEQ ID NO: 9343 - DNA, 39 bp, Artificial Sequence; identical to SEQ ID NO: 5270
  Description of Artificial Sequence: Synthetic primer
  Description of Combined DNA/RNA Molecule: Synthetic primer

SEQ ID NO: 9344 - DNA, 37 bp, Artificial Sequence; identical to SEQ ID NO: 5271
  Description of Artificial Sequence: Synthetic primer
  Description of Combined DNA/RNA Molecule: Synthetic primer

SEQ ID NO: 9345 - DNA, 55 bp, Artificial Sequence; identical to SEQ ID NO: 5272
  Description of Artificial Sequence: Synthetic primer
  Description of Combined DNA/RNA Molecule: Synthetic primer

SEQ ID NO: 9346 - DNA, 49 bp, Artificial Sequence; identical to SEQ ID NO: 5273
  Description of Artificial Sequence: Synthetic oligonucleotide
  Description of Combined DNA/RNA Molecule: Synthetic oligonucleotide

SEQ ID NO: 9347 - DNA, 48 bp, Artificial Sequence; identical to SEQ ID NO: 5274
  Description of Artificial Sequence: Synthetic oligonucleotide

SEQ ID NO: 9348 - DNA, 26 bp, Artificial Sequence
  Description of Artificial Sequence: Synthetic probe
tttggcgcacacaacttccaggacag

SEQ ID NO: 9349 - DNA, 20 bp, Artificial Sequence
  Description of Artificial Sequence: Synthetic primer
ttcttcacagtaccgccaca

SEQ ID NO: 9350 - DNA, 19 bp, Artificial Sequence
  Description of Artificial Sequence: Synthetic primer
tgcaccaccagacaacaca

SEQ ID NO: 9351 - DNA, 45 bp, Artificial Sequence; identical to SEQ ID NO: 5278
  Description of Artificial Sequence: Synthetic primer
  Description of Combined DNA/RNA Molecule: Synthetic primer

SEQ ID NO: 9352 - DNA, 40 bp, Artificial Sequence; identical to SEQ ID NO: 5396
  Description of Artificial Sequence: Synthetic primer
  Description of Combined DNA/RNA Molecule: Synthetic primer

SEQ ID NO: 9353 - DNA, 40 bp, Artificial Sequence; identical to SEQ ID NO: 5397
  Description of Artificial Sequence: Synthetic primer
  Description of Combined DNA/RNA Molecule: Synthetic primer

SEQ ID NO: 9354 - DNA, 50 bp, Artificial Sequence; identical to SEQ ID NO: 5398
  Description of Artificial Sequence: Synthetic primer
  Description of Combined DNA/RNA Molecule: Synthetic primer

SEQ ID NO: 9355 - DNA, 46 bp, Artificial Sequence; identical to SEQ ID NO: 5399
  Description of Artificial Sequence: Synthetic oligonucleotide
  Description of Combined DNA/RNA Molecule: Synthetic oligonucleotide

SEQ ID NO: 9356 - DNA, 43 bp, Artificial Sequence; identical to SEQ ID NO: 5400
  Description of Artificial Sequence: Synthetic oligonucleotide

SEQ ID NO: 9357 - DNA, 20 bp, Artificial Sequence
  Description of Artificial Sequence: Synthetic probe
ttcccaccaggagccagcac

SEQ ID NO: 9358 - DNA, 19 bp, Artificial Sequence
  Description of Artificial Sequence: Synthetic primer
ttgcaacaggctaccgacc

SEQ ID NO: 9359 - DNA, 21 bp, Artificial Sequence
  Description of Artificial Sequence: Synthetic primer
tgcgtgacttccttacctacc

SEQ ID NO: 9360 - DNA, 46 bp, Artificial Sequence; identical to SEQ ID NO: 5404
  Description of Artificial Sequence: Synthetic primer
  Description of Combined DNA/RNA Molecule: Synthetic primer

SEQ ID NO: 9361 - DNA, 48 bp, Artificial Sequence; identical to SEQ ID NO: 5405
  Description of Artificial Sequence: Synthetic primer
  Description of Combined DNA/RNA Molecule: Synthetic primer

SEQ ID NO: 9362 - DNA, 45 bp, Artificial Sequence; identical to SEQ ID NO: 5406
  Description of Artificial Sequence: Synthetic primer
  Description of Combined DNA/RNA Molecule: Synthetic primer

SEQ ID NO: 9363 - DNA, 46 bp, Artificial Sequence; identical to SEQ ID NO: 5407
  Description of Artificial Sequence: Synthetic primer
  Description of Combined DNA/RNA Molecule: Synthetic primer

SEQ ID NO: 9364 - DNA, 47 bp, Artificial Sequence; identical to SEQ ID NO: 5408
  Description of Artificial Sequence: Synthetic oligonucleotide
  Description of Combined DNA/RNA Molecule: Synthetic oligonucleotide

SEQ ID NO: 9365 - DNA, 42 bp, Artificial Sequence; identical to SEQ ID NO: 5409
  Description of Artificial Sequence: Synthetic oligonucleotide

SEQ ID NO: 9366 - DNA, 23 bp, Artificial Sequence
  Description of Artificial Sequence: Synthetic probe
ttactctcacacctgccagcccc

SEQ ID NO: 9367 - DNA, 22 bp, Artificial Sequence
  Description of Artificial Sequence: Synthetic primer
taagcctgcttttccgaaacaa

SEQ ID NO: 9368 - DNA, 21 bp, Artificial Sequence
  Description of Artificial Sequence: Synthetic primer
tgctatcctggcgcaatacaa

SEQ ID NO: 9369 - DNA, 45 bp, Artificial Sequence; identical to SEQ ID NO: 5413
  Description of Artificial Sequence: Synthetic primer
  Description of Combined DNA/RNA Molecule: Synthetic primer

SEQ ID NO: 9370 - DNA, 39 bp, Artificial Sequence; identical to SEQ ID NO: 5522
  Description of Artificial Sequence: Synthetic primer
  Description of Combined DNA/RNA Molecule: Synthetic primer

SEQ ID NO: 9371 - DNA, 39 bp, Artificial Sequence; identical to SEQ ID NO: 5523
  Description of Artificial Sequence: Synthetic primer
  Description of Combined DNA/RNA Molecule: Synthetic primer

SEQ ID NO: 9372 - DNA, 52 bp, Artificial Sequence; identical to SEQ ID NO: 5524
  Description of Artificial Sequence: Synthetic primer
  Description of Combined DNA/RNA Molecule: Synthetic primer

SEQ ID NO: 9373 - DNA, 46 bp, Artificial Sequence; identical to SEQ ID NO: 5525
  Description of Artificial Sequence: Synthetic oligonucleotide
  Description of Combined DNA/RNA Molecule: Synthetic oligonucleotide

SEQ ID NO: 9374 - DNA, 49 bp, Artificial Sequence; identical to SEQ ID NO: 5526
  Description of Artificial Sequence: Synthetic oligonucleotide

SEQ ID NO: 9375 - DNA, 29 bp, Artificial Sequence
  Description of Artificial Sequence: Synthetic probe
ttatgcgcatgtctgtcaaatcactgcct

SEQ ID NO: 9376 - DNA, 19 bp, Artificial Sequence
  Description of Artificial Sequence: Synthetic primer
ttcgtccctgcacgctaac

SEQ ID NO: 9377 - DNA, 20 bp, Artificial Sequence
  Description of Artificial Sequence: Synthetic primer
tggcctaacggtgatggaac

SEQ ID NO: 9378 - DNA, 44 bp, Artificial Sequence; identical to SEQ ID NO: 5530
  Description of Artificial Sequence: Synthetic primer
  Description of Combined DNA/RNA Molecule: Synthetic primer

SEQ ID NO: 9379 - DNA, 38 bp, Artificial Sequence; identical to SEQ ID NO: 5886
  Description of Artificial Sequence: Synthetic primer
  Description of Combined DNA/RNA Molecule: Synthetic primer

SEQ ID NO: 9380 - DNA, 40 bp, Artificial Sequence; identical to SEQ ID NO: 5887
  Description of Artificial Sequence: Synthetic primer
  Description of Combined DNA/RNA Molecule: Synthetic primer

SEQ ID NO: 9381 - DNA, 52 bp, Artificial Sequence; identical to SEQ ID NO: 5888
  Description of Artificial Sequence: Synthetic primer
  Description of Combined DNA/RNA Molecule: Synthetic primer

SEQ ID NO: 9382 - DNA, 51 bp, Artificial Sequence; identical to SEQ ID NO: 5889
  Description of Artificial Sequence: Synthetic oligonucleotide
  Description of Combined DNA/RNA Molecule: Synthetic oligonucleotide

SEQ ID NO: 9383 - DNA, 48 bp, Artificial Sequence; identical to SEQ ID NO: 5890
  Description of Artificial Sequence: Synthetic oligonucleotide

SEQ ID NO: 9384 - DNA, 32 bp, Artificial Sequence; identical to SEQ ID NO: 5891
  Description of Artificial Sequence: Synthetic probe

SEQ ID NO: 9385 - DNA, 21 bp, Artificial Sequence
  Description of Artificial Sequence: Synthetic primer
tctcataccagacgcggtaac

SEQ ID NO: 9386 - DNA, 19 bp, Artificial Sequence
  Description of Artificial Sequence: Synthetic primer
taagcacagcgacacgaac

SEQ ID NO: 9387 - DNA, 47 bp, Artificial Sequence; identical to SEQ ID NO: 5894
  Description of Artificial Sequence: Synthetic primer
  Description of Combined DNA/RNA Molecule: Synthetic primer

SEQ ID NO: 9388 - DNA, 40 bp, Artificial Sequence; identical to SEQ ID NO: 5895
  Description of Artificial Sequence: Synthetic primer
  Description of Combined DNA/RNA Molecule: Synthetic primer

SEQ ID NO: 9389 - DNA, 41 bp, Artificial Sequence; identical to SEQ ID NO: 5896
  Description of Artificial Sequence: Synthetic primer
  Description of Combined DNA/RNA Molecule: Synthetic primer

SEQ ID NO: 9390 - DNA, 55 bp, Artificial Sequence; identical to SEQ ID NO: 5897
  Description of Artificial Sequence: Synthetic primer
  Description of Combined DNA/RNA Molecule: Synthetic primer

SEQ ID NO: 9391 - DNA, 44 bp, Artificial Sequence; identical to SEQ ID NO: 5898
  Description of Artificial Sequence: Synthetic oligonucleotide
  Description of Combined DNA/RNA Molecule: Synthetic oligonucleotide

SEQ ID NO: 9392 - DNA, 55 bp, Artificial Sequence; identical to SEQ ID NO: 8864
  Description of Artificial Sequence: Synthetic oligonucleotide

SEQ ID NO: 9393 - DNA, 35 bp, Artificial Sequence; identical to SEQ ID NO: 5900
  Description of Artificial Sequence: Synthetic probe

SEQ ID NO: 9394 - DNA, 19 bp, Artificial Sequence
  Description of Artificial Sequence: Synthetic primer
ttttcggcggcagctaaac

SEQ ID NO: 9395 - DNA, 19 bp, Artificial Sequence
  Description of Artificial Sequence: Synthetic primer
taagcacagcgacacgaac

SEQ ID NO: 9396 - DNA, 54 bp, Artificial Sequence; identical to SEQ ID NO: 5903
  Description of Artificial Sequence: Synthetic primer
  Description of Combined DNA/RNA Molecule: Synthetic primer

SEQ ID NO: 9397 - DNA, 42 bp, Artificial Sequence; identical to SEQ ID NO: 5949
  Description of Artificial Sequence: Synthetic primer
  Description of Combined DNA/RNA Molecule: Synthetic primer

SEQ ID NO: 9398 - DNA, 44 bp, Artificial Sequence; identical to SEQ ID NO: 5950
  Description of Artificial Sequence: Synthetic primer
  Description of Combined DNA/RNA Molecule: Synthetic primer

SEQ ID NO: 9399 - DNA, 50 bp, Artificial Sequence; identical to SEQ ID NO: 5951
  Description of Artificial Sequence: Synthetic primer
  Description of Combined DNA/RNA Molecule: Synthetic primer

SEQ ID NO: 9400 - DNA, 52 bp, Artificial Sequence; identical to SEQ ID NO: 5952
  Description of Artificial Sequence: Synthetic oligonucleotide
  Description of Combined DNA/RNA Molecule: Synthetic oligonucleotide

SEQ ID NO: 9401 - DNA, 50 bp, Artificial Sequence; identical to SEQ ID NO: 5953
  Description of Artificial Sequence: Synthetic oligonucleotide

SEQ ID NO: 9402 - DNA, 33 bp, Artificial Sequence; identical to SEQ ID NO: 5954
  Description of Artificial Sequence: Synthetic probe

SEQ ID NO: 9403 - DNA, 22 bp, Artificial Sequence
  Description of Artificial Sequence: Synthetic primer
tccaaacaagctgatccgtaca

SEQ ID NO: 9404 - DNA, 19 bp, Artificial Sequence
  Description of Artificial Sequence: Synthetic primer
tagtaaccgctccgacaca

SEQ ID NO: 9405 - DNA, 45 bp, Artificial Sequence; identical to SEQ ID NO: 5957
  Description of Artificial Sequence: Synthetic primer
  Description of Combined DNA/RNA Molecule: Synthetic primer

SEQ ID NO: 9406 - DNA, 49 bp, Artificial Sequence; identical to SEQ ID NO: 6075
  Description of Artificial Sequence: Synthetic primer
  Description of Combined DNA/RNA Molecule: Synthetic primer

SEQ ID NO: 9407 - DNA, 53 bp, Artificial Sequence; identical to SEQ ID NO: 6076
  Description of Artificial Sequence: Synthetic primer
  Description of Combined DNA/RNA Molecule: Synthetic primer

SEQ ID NO: 9408 - DNA, 54 bp, Artificial Sequence; identical to SEQ ID NO: 6077
  Description of Artificial Sequence: Synthetic primer
  Description of Combined DNA/RNA Molecule: Synthetic primer

SEQ ID NO: 9409 - DNA, 56 bp, Artificial Sequence; identical to SEQ ID NO: 6078
  Description of Artificial Sequence: Synthetic oligonucleotide
  Description of Combined DNA/RNA Molecule: Synthetic oligonucleotide

SEQ ID NO: 9410 - DNA, 52 bp, Artificial Sequence; identical to SEQ ID NO: 6079
  Description of Artificial Sequence: Synthetic oligonucleotide

SEQ ID NO: 9411 - DNA, 28 bp, Artificial Sequence
  Description of Artificial Sequence: Synthetic probe
aaagaaccacatcctcccaaatgctccc

SEQ ID NO: 9412 - DNA, 22 bp, Artificial Sequence
  Description of Artificial Sequence: Synthetic primer
tatctcctaaaagaagccgcac

SEQ ID NO: 9413 - DNA, 20 bp, Artificial Sequence
  Description of Artificial Sequence: Synthetic primer
tccatcgcccttaatcccac

SEQ ID NO: 9414 - DNA, 52 bp, Artificial Sequence; identical to SEQ ID NO: 6083
  Description of Artificial Sequence: Synthetic primer
  Description of Combined DNA/RNA Molecule: Synthetic primer

SEQ ID NO: 9415 - DNA, 43 bp, Artificial Sequence
  Description of Artificial Sequence: Synthetic primer
  Description of Combined DNA/RNA Molecule: Synthetic primer
acgacgacgacgaacagtccttcacctgtcccttgacaccctc

SEQ ID NO: 9416 - DNA, 41 bp, Artificial Sequence
  Description of Artificial Sequence: Synthetic primer
  Description of Combined DNA/RNA Molecule: Synthetic primer
acgacgacgacgaacacctgtcccttgacaccctgcatccc

SEQ ID NO: 9417 - DNA, 54 bp, Artificial Sequence
  Description of Artificial Sequence: Synthetic primer
  Description of Combined DNA/RNA Molecule: Synthetic primer
acgacgacgacttgacgaacataatggaggaagaccccagtctgcagtcuatga

SEQ ID NO: 9418 - DNA, 50 bp, Artificial Sequence
  Description of Artificial Sequence: Synthetic oligonucleotide
  Description of Combined DNA/RNA Molecule: Synthetic oligonucleotide
taacgggattgagagtggacacctgactcacagccccatcaggcactcct

SEQ ID NO: 9419 - DNA, 49 bp, Artificial Sequence
  Description of Artificial Sequence: Synthetic oligonucleotide
ctctcccaggaccaccacaggaccagtttctgtctgccgcccttactaa

SEQ ID NO: 9420 - DNA, 24 bp, Artificial Sequence
  Description of Artificial Sequence: Synthetic probe
tttcaggcactctcccaggaccac

SEQ ID NO: 9421 - DNA, 21 bp, Artificial Sequence
  Description of Artificial Sequence: Synthetic primer
taacgggattgagagtggaca

SEQ ID NO: 9422 - DNA, 19 bp, Artificial Sequence
  Description of Artificial Sequence: Synthetic primer
ttagtaagggcggcagaca

SEQ ID NO: 9423 - DNA, 52 bp, Artificial Sequence
  Description of Artificial Sequence: Synthetic primer
  Description of Combined DNA/RNA Molecule: Synthetic primer
ttagtaagggcggcagacagtctgcagtctatggaaactggtcctatggtga

SEQ ID NO: 9424 - DNA, 43 bp, Artificial Sequence
  Description of Artificial Sequence: Synthetic primer
  Description of Combined DNA/RNA Molecule: Synthetic primer
acgacgacgacgaaaagtctttctttggcagccctccagcccc

SEQ ID NO: 9425 - DNA, 38 bp, Artificial Sequence
  Description of Artificial Sequence: Synthetic primer
  Description of Combined DNA/RNA Molecule: Synthetic primer
acgacgacgacgaaggcagccctccagcccttaccttc

SEQ ID NO: 9426 - DNA, 56 bp, Artificial Sequence
  Description of Artificial Sequence: Synthetic primer
  Description of Combined DNA/RNA Molecule: Synthetic primer
acgacgacgacttgacgaacataatcaatgtcactgtgtggctgttggtgaggacc

SEQ ID NO: 9427 - DNA, 44 bp, Artificial Sequence
  Description of Artificial Sequence: Synthetic oligonucleotide
  Description of Combined DNA/RNA Molecule: Synthetic oligonucleotide
taacgggattgagagtggacacacaccccccaccccgcactctt

SEQ ID NO: 9428 - DNA, 50 bp, Artificial Sequence
  Description of Artificial Sequence: Synthetic oligonucleotide
ctccctgaactgctgtgcatcaagctgagtctgtctgccgcccttactaa

SEQ ID NO: 9429 - DNA, 24 bp, Artificial Sequence
  Description of Artificial Sequence: Synthetic probe
ttccccgcactccctgaactgctg

SEQ ID NO: 9430 - DNA, 21 bp, Artificial Sequence
  Description of Artificial Sequence: Synthetic primer
taacgggattgagagtggaca

SEQ ID NO: 9431 - DNA, 19 bp, Artificial Sequence
  Description of Artificial Sequence: Synthetic primer
ttagtaagggcggcagaca

SEQ ID NO: 9432 - DNA, 49 bp, Artificial Sequence
  Description of Artificial Sequence: Synthetic primer
  Description of Combined DNA/RNA Molecule: Synthetic primer
ttagtaagggcggcagacagctgttggtgaggactcagcttggtgcacg

SEQ ID NO: 9433 - DNA, 40 bp, Artificial Sequence
  Description of Artificial Sequence: Synthetic primer
  Description of Combined DNA/RNA Molecule: Synthetic primer
acgacgacgacgaaaggcagccattacaggccacacctct

SEQ ID NO: 9434 - DNA, 40 bp, Artificial Sequence
  Description of Artificial Sequence: Synthetic primer
  Description of Combined DNA/RNA Molecule: Synthetic primer
acgacgacgacgaagccattacaggccacacctcccaccg

SEQ ID NO: 9435 - DNA, 53 bp, Artificial Sequence
  Description of Artificial Sequence: Synthetic primer
  Description of Combined DNA/RNA Molecule: Synthetic primer
acgacgacgacttgacgaacataattgtctgggtccccttgctgcttcagttt

SEQ ID NO: 9436 - DNA, 44 bp, Artificial Sequence
  Description of Artificial Sequence: Synthetic oligonucleotide
  Description of Combined DNA/RNA Molecule: Synthetic oligonucleotide
ttggtacgaggagggcacagccagtcactggcaggaacauccga

SEQ ID NO: 9437 - DNA, 44 bp, Artificial Sequence
  Description of Artificial Sequence: Synthetic oligonucleotide
tccagggagggagcagaccccattctgtctgccgcccttactaa

SEQ ID NO: 9438 - DNA, 25 bp, Artificial Sequence
  Description of Artificial Sequence: Synthetic probe
ttaggaacatccagggagggagcag

SEQ ID NO: 9439 - DNA, 19 bp, Artificial Sequence
  Description of Artificial Sequence: Synthetic primer
ttggtacgaggagggcaca

SEQ ID NO: 9440 - DNA, 19 bp, Artificial Sequence
  Description of Artificial Sequence: Synthetic primer
ttagtaagggcggcagaca

SEQ ID NO: 9441 - DNA, 49 bp, Artificial Sequence
  Description of Artificial Sequence: Synthetic primer
  Description of Combined DNA/RNA Molecule: Synthetic primer
ttagtaagggcggcagacacttcagttctgaggtgagggtgagtgggac

SEQ ID NO: 9442 - DNA, 40 bp, Artificial Sequence
  Description of Artificial Sequence: Synthetic primer
  Description of Combined DNA/RNA Molecule: Synthetic primer
acgacgacgacgaataaccccacctcatgctggcacagct

SEQ ID NO: 9443 - DNA, 39 bp, Artificial Sequence
  Description of Artificial Sequence: Synthetic primer
  Description of Combined DNA/RNA Molecule: Synthetic primer
acgacgacgacgaacacctcatgctggcacagcccccat

SEQ ID NO: 9444 - DNA, 54 bp, Artificial Sequence
  Description of Artificial Sequence: Synthetic primer
  Description of Combined DNA/RNA Molecule: Synthetic primer
acgacgacgacttgacgaacataatgaggccctggatgaagaatgtggcugata

SEQ ID NO: 9445 - DNA, 45 bp, Artificial Sequence
  Description of Artificial Sequence: Synthetic oligonucleotide
  Description of Combined DNA/RNA Molecule: Synthetic oligonucleotide
tcagacgcactaaacaggcaacaccagcctccccagctcagcttt

SEQ ID NO: 9446 - DNA, 47 bp, Artificial Sequence
  Description of Artificial Sequence: Synthetic oligonucleotide
gctccaggctgcatagtcttcccagctgttgcggatcgtcgtgtgaa

SEQ ID NO: 9447 - DNA, 30 bp, Artificial Sequence
  Description of Artificial Sequence: Synthetic probe
ttcagctcagctccaggctgcatagtcttc

SEQ ID NO: 9448 - DNA, 21 bp, Artificial Sequence
  Description of Artificial Sequence: Synthetic primer
tcagacgcactaaacaggcaa

SEQ ID NO: 9449 - DNA, 19 bp, Artificial Sequence
  Description of Artificial Sequence: Synthetic primer
ttcacacgacgatccgcaa

SEQ ID NO: 9450 - DNA, 49 bp, Artificial Sequence
  Description of Artificial Sequence: Synthetic primer
  Description of Combined DNA/RNA Molecule: Synthetic primer
ttcacacgacgatccgcaagccctggatgaagaatgtggctggtgctgg

SEQ ID NO: 9451 - DNA, 38 bp, Artificial Sequence
  Description of Artificial Sequence: Synthetic primer
  Description of Combined DNA/RNA Molecule: Synthetic primer
acgacgacgacgaaccccttgtcccacccagcaactga

SEQ ID NO: 9452 - DNA, 41 bp, Artificial Sequence
  Description of Artificial Sequence: Synthetic primer
  Description of Combined DNA/RNA Molecule: Synthetic primer
acgacgacgacgaagtcccacccagcaactggttgacaggg

SEQ ID NO: 9453 - DNA, 46 bp, Artificial Sequence
  Description of Artificial Sequence: Synthetic primer
  Description of Combined DNA/RNA Molecule: Synthetic primer
acgacgacgacttgacgaacataatcaccctgggcccctgcuggcc

SEQ ID NO: 9454 - DNA, 46 bp, Artificial Sequence
  Description of Artificial Sequence: Synthetic oligonucleotide
  Description of Combined DNA/RNA Molecule: Synthetic oligonucleotide
ttccatcgagcgccaacaagggtgtctatggactggcaacaggcgt

SEQ ID NO: 9455 - DNA, 46 bp, Artificial Sequence
  Description of Artificial Sequence: Synthetic oligonucleotide
ggcaccccttttcctcacctccctgcattgcggatcgtcgtgtgaa

SEQ ID NO: 9456 - DNA, 27 bp, Artificial Sequence
  Description of Artificial Sequence: Synthetic probe
aaggcaacaggcaccccttttcctcac

SEQ ID NO: 9457 - DNA, 19 bp, Artificial Sequence
  Description of Artificial Sequence: Synthetic primer
ttccatcgagcgccaacaa

SEQ ID NO: 9458 - DNA, 19 bp, Artificial Sequence
  Description of Artificial Sequence: Synthetic primer
ttcacacgacgatccgcaa

SEQ ID NO: 9459 - DNA, 42 bp, Artificial Sequence
  Description of Artificial Sequence: Synthetic primer
  Description of Combined DNA/RNA Molecule: Synthetic primer
ttcacacgacgatccgcaatgggcccctgctggctatgcaga

SEQ ID NO: 9460 - DNA, 36 bp, Artificial Sequence
  Description of Artificial Sequence: Synthetic primer
  Description of Combined DNA/RNA Molecule: Synthetic primer
acgacgacgacgaatggcacagcccccaccagcctt

SEQ ID NO: 9461 - DNA, 38 bp, Artificial Sequence
  Description of Artificial Sequence: Synthetic primer
  Description of Combined DNA/RNA Molecule: Synthetic primer
acgacgacgacgaacacagcccccaccagcctccccaa

SEQ ID NO: 9462 - DNA, 48 bp, Artificial Sequence
  Description of Artificial Sequence: Synthetic primer
  Description of Combined DNA/RNA Molecule: Synthetic primer
acgacgacgacttgacgaacataatggtgctggaggccctggaugaaa

SEQ ID NO: 9463 - DNA, 42 bp, Artificial Sequence
  Description of Artificial Sequence: Synthetic oligonucleotide
  Description of Combined DNA/RNA Molecule: Synthetic oligonucleotide
tttcgctcgacgcataccagcccagctccaggctacauagct

SEQ ID NO: 9464 - DNA, 48 bp, Artificial Sequence
  Description of Artificial Sequence: Synthetic oligonucleotide
tagtcttcccagctgggtctcagcatcagtggcgcggctactgtaaaa

SEQ ID NO: 9465 - DNA, 29 bp, Artificial Sequence
  Description of Artificial Sequence: Synthetic probe
ttggctacatagtcttcccagctgggtct

SEQ ID NO: 9466 - DNA, 19 bp, Artificial Sequence
  Description of Artificial Sequence: Synthetic primer
tttcgctcgacgcatacca

SEQ ID NO: 9467 - DNA, 19 bp, Artificial Sequence
  Description of Artificial Sequence: Synthetic primer
ttttacagtagccgcgcca

SEQ ID NO: 9468 - DNA, 48 bp, Artificial Sequence
  Description of Artificial Sequence: Synthetic primer
  Description of Combined DNA/RNA Molecule: Synthetic primer
ttttacagtagccgcgccactggaggccctggatgaagaatatggcta

SEQ ID NO: 9469 - DNA, 38 bp, Artificial Sequence
  Description of Artificial Sequence: Synthetic primer
  Description of Combined DNA/RNA Molecule: Synthetic primer
acgacgacgacgaaggctcctggcacaggtgcaaggat

SEQ ID NO: 9470 - DNA, 39 bp, Artificial Sequence
  Description of Artificial Sequence: Synthetic primer
  Description of Combined DNA/RNA Molecule: Synthetic primer
acgacgacgacgaatcctggcacaggtgcaaggacatcg

SEQ ID NO: 9471 - DNA, 56 bp, Artificial Sequence
  Description of Artificial Sequence: Synthetic primer
  Description of Combined DNA/RNA Molecule: Synthetic primer
acgacgacgacttgacgaacataatggaaatgactcctctggtgccacctacagta

SEQ ID NO: 9472 - DNA, 46 bp, Artificial Sequence
  Description of Artificial Sequence: Synthetic oligonucleotide
  Description of Combined DNA/RNA Molecule: Synthetic oligonucleotide
ttcttgcccgcttgttccacatcagaggaaggcatctgtcaccttg

SEQ ID NO: 9473 - DNA, 46 bp, Artificial Sequence
  Description of Artificial Sequence: Synthetic oligonucleotide
cctcatggagacttggagcatggagtgtggcgcggctactgtaaaa

SEQ ID NO: 9474 - DNA, 27 bp, Artificial Sequence
  Description of Artificial Sequence: Synthetic probe
tttctgtcacctcatggagacttggag

SEQ ID NO: 9475 - DNA, 19 bp, Artificial Sequence
  Description of Artificial Sequence: Synthetic primer
ttcttgcccgcttgttcca

SEQ ID NO: 9476 - DNA, 19 bp, Artificial Sequence
  Description of Artificial Sequence: Synthetic primer
ttttacagtagccgcgcca

SEQ ID NO: 9477 - DNA, 51 bp, Artificial Sequence
  Description of Artificial Sequence: Synthetic primer
  Description of Combined DNA/RNA Molecule: Synthetic primer
ttttacagtagccgcgccacagtgtctacatggaaatgcaccccgtgctct

SEQ ID NO: 9478 - DNA, 41 bp, Artificial Sequence
  Description of Artificial Sequence: Synthetic primer
  Description of Combined DNA/RNA Molecule: Synthetic primer
acgacgacgacgaagcatttccaggcttccaccccaccccc

SEQ ID NO: 9479 - DNA, 38 bp, Artificial Sequence
  Description of Artificial Sequence: Synthetic primer
  Description of Combined DNA/RNA Molecule: Synthetic primer
acgacgacgacgaaccaggcttccaccccacccctgcc

SEQ ID NO: 9480 - DNA, 52 bp, Artificial Sequence
  Description of Artificial Sequence: Synthetic primer
  Description of Combined DNA/RNA Molecule: Synthetic primer
acgacgacgacttgacgaacataatcctgcagtaaggctgctcaggcuggcc

SEQ ID NO: 9481 - DNA, 45 bp, Artificial Sequence
  Description of Artificial Sequence: Synthetic oligonucleotide
  Description of Combined DNA/RNA Molecule: Synthetic oligonucleotide
ttttcggcggcagctaaacccctgtcacctcccctcaacauccgc

SEQ ID NO: 9482 - DNA, 44 bp, Artificial Sequence
  Description of Artificial Sequence: Synthetic oligonucleotide
tccatcagcacagcctgcttcctgcgttcgtgtcgctgtgctta

SEQ ID NO: 9483 - DNA, 30 bp, Artificial Sequence
  Description of Artificial Sequence: Synthetic probe
ttctcaacatccatcagcacagcctgcttc

SEQ ID NO: 9484 - DNA, 19 bp, Artificial Sequence
  Description of Artificial Sequence: Synthetic primer
ttttcggcggcagctaaac

SEQ ID NO: 9485 - DNA, 19 bp, Artificial Sequence
  Description of Artificial Sequence: Synthetic primer
taagcacagcgacacgaac

SEQ ID NO: 9486 - DNA, 45 bp, Artificial Sequence
  Description of Artificial Sequence: Synthetic primer
  Description of Combined DNA/RNA Molecule: Synthetic primer
taagcacagcgacacgaactgcagtaaggctgctcaggttggcta

SEQ ID NO: 9487 - DNA, 40 bp, Artificial Sequence
  Description of Artificial Sequence: Synthetic primer
  Description of Combined DNA/RNA Molecule: Synthetic primer
acgacgacgacgaacacctggactgaggtcttccactgcc

SEQ ID NO: 9488 - DNA, 41 bp, Artificial Sequence
  Description of Artificial Sequence: Synthetic primer
  Description of Combined DNA/RNA Molecule: Synthetic primer
acgacgacgacgaagactgaggtcttccactgctgcagccc

SEQ ID NO: 9489 - DNA, 52 bp, Artificial Sequence
  Description of Artificial Sequence: Synthetic primer
  Description of Combined DNA/RNA Molecule: Synthetic primer
acgacgacgacttgacgaacataatcctctcctccatccctggtgaaaacta

SEQ ID NO: 9490 - DNA, 46 bp, Artificial Sequence
  Description of Artificial Sequence: Synthetic oligonucleotide
  Description of Combined DNA/RNA Molecule: Synthetic oligonucleotide
ttagccgccaaacgtaccagcctcctccagacacaccatcaccttt

SEQ ID NO: 9491 - DNA, 45 bp, Artificial Sequence
  Description of Artificial Sequence: Synthetic oligonucleotide
cctccagttgctgcacccagctcagtgggcaggaacacgatagta

SEQ ID NO: 9492 - DNA, 25 bp, Artificial Sequence
  Description of Artificial Sequence: Synthetic probe
ttaccatcacctccagttgctgcac

SEQ ID NO: 9493 - DNA, 19 bp, Artificial Sequence
  Description of Artificial Sequence: Synthetic primer
ttagccgccaaacgtacca

SEQ ID NO: 9494 - DNA, 20 bp, Artificial Sequence
  Description of Artificial Sequence: Synthetic primer
tactatcgtgttcctgccca

SEQ ID NO: 9495 - DNA, 48 bp, Artificial Sequence
  Description of Artificial Sequence: Synthetic primer
  Description of Combined DNA/RNA Molecule: Synthetic primer
tactatcgtgttcctgcccaccctggtgaaaactgtgggctttgagcc

SEQ ID NO: 9496 - DNA, 49 bp, Artificial Sequence; identical to SEQ ID NO: 110
  Description of Artificial Sequence: Synthetic primer
  Description of Combined DNA/RNA Molecule: Synthetic primer

SEQ ID NO: 9497 - DNA, 51 bp, Artificial Sequence
  Description of Artificial Sequence: Synthetic primer
  Description of Combined DNA/RNA Molecule: Synthetic primer
acgacgacgacgaaggaaaaatacatttcccatgaggcattgtgacuagag

SEQ ID NO: 9498 - DNA, 53 bp, Artificial Sequence
  Description of Artificial Sequence: Synthetic primer
  Description of Combined DNA/RNA Molecule: Synthetic primer
acgacgacgacttgacgaacataatgggtgacactgcagtgatgtggcugggt

SEQ ID NO: 9499 - DNA, 46 bp, Artificial Sequence
  Description of Artificial Sequence: Synthetic oligonucleotide
  Description of Combined DNA/RNA Molecule: Synthetic oligonucleotide
tagcagctgaacaacccaacgaggtggacagcagagtgtcacaatg

SEQ ID NO: 9500 - DNA, 51 bp, Artificial Sequence
  Description of Artificial Sequence: Synthetic oligonucleotide
caacaactgccaggagttgtagttctccccagttgtatggtcggcatgcta

SEQ ID NO: 9501 - DNA, 31 bp, Artificial Sequence
  Description of Artificial Sequence: Synthetic probe
ttagtgtcacaacaactgccaggagttgtag

SEQ ID NO: 9502 - DNA, 20 bp, Artificial Sequence
  Description of Artificial Sequence: Synthetic primer
tagcagctgaacaacccaac

SEQ ID NO: 9503 - DNA, 20 bp, Artificial Sequence
  Description of Artificial Sequence: Synthetic primer
tagcatgccgaccatacaac

SEQ ID NO: 9504 - DNA, 48 bp, Artificial Sequence
  Description of Artificial Sequence: Synthetic primer
  Description of Combined DNA/RNA Molecule: Synthetic primer
tagcatgccgaccatacaacggtgacactgcagtgatgtggttgggag

SEQ ID NO: 9505 - DNA, 42 bp, Artificial Sequence
  Description of Artificial Sequence: Synthetic primer
  Description of Combined DNA/RNA Molecule: Synthetic primer
acgacgacgacgaaggtcacagccacccagatgttcagtcct

SEQ ID NO: 9506 - DNA, 43 bp, Artificial Sequence
  Description of Artificial Sequence: Synthetic primer
  Description of Combined DNA/RNA Molecule: Synthetic primer
acgacgacgacgaatcacagccacccagatgttcagtccccat

SEQ ID NO: 9507 - DNA, 57 bp, Artificial Sequence
  Description of Artificial Sequence: Synthetic primer
  Description of Combined DNA/RNA Molecule: Synthetic primer
acgacgacgacttgacgaacataatgcatcaatgcctggcatttgttttcaaaccat

SEQ ID NO: 9508 - DNA, 51 bp, Artificial Sequence
  Description of Artificial Sequence: Synthetic oligonucleotide
  Description of Combined DNA/RNA Molecule: Synthetic oligonucleotide
tctgcccttcgcttcgaaccccactccttcctccactgaaaagccacactg

SEQ ID NO: 9509 - DNA, 50 bp, Artificial Sequence
  Description of Artificial Sequence: Synthetic oligonucleotide
caccaatgactaacattgcctgccagcctggttgtatggtcggcatgcta

SEQ ID NO: 9510 - DNA, 31 bp, Artificial Sequence
  Description of Artificial Sequence: Synthetic probe
ttaaagccacaccaatgactaacattgcctg

SEQ ID NO: 9511 - DNA, 19 bp, Artificial Sequence
  Description of Artificial Sequence: Synthetic primer
tctgcccttcgcttcgaac

SEQ ID NO: 9512 - DNA, 20 bp, Artificial Sequence
  Description of Artificial Sequence: Synthetic primer
tagcatgccgaccatacaac

SEQ ID NO: 9513 - DNA, 51 bp, Artificial Sequence
  Description of Artificial Sequence: Synthetic primer
  Description of Combined DNA/RNA Molecule: Synthetic primer
tagcatgccgaccatacaacggcatttgttttcaaaccaccaggttggcaa

SEQ ID NO: 9514 - DNA, 40 bp, Artificial Sequence; identical to SEQ ID NO: 960
  Description of Artificial Sequence: Synthetic primer
  Description of Combined DNA/RNA Molecule: Synthetic primer

SEQ ID NO: 9515 - DNA, 41 bp, Artificial Sequence; identical to SEQ ID NO: 961
  Description of Artificial Sequence: Synthetic primer
  Description of Combined DNA/RNA Molecule: Synthetic primer

SEQ ID NO: 9516 - DNA, 49 bp, Artificial Sequence; identical to SEQ ID NO: 962
  Description of Artificial Sequence: Synthetic primer
  Description of Combined DNA/RNA Molecule: Synthetic primer

SEQ ID NO: 9517 - DNA, 45 bp, Artificial Sequence; identical to SEQ ID NO: 963
  Description of Artificial Sequence: Synthetic oligonucleotide
  Description of Combined DNA/RNA Molecule: Synthetic oligonucleotide

SEQ ID NO: 9518 - DNA, 44 bp, Artificial Sequence; identical to SEQ ID NO: 964
  Description of Artificial Sequence: Synthetic oligonucleotide

SEQ ID NO: 9519 - DNA, 21 bp, Artificial Sequence
  Description of Artificial Sequence: Synthetic probe
ttcagcacacccagcaggtgc

SEQ ID NO: 9520 - DNA, 21 bp, Artificial Sequence
  Description of Artificial Sequence: Synthetic primer
ttgaaggaggaaatcggcaca

SEQ ID NO: 9521 - DNA, 22 bp, Artificial Sequence
  Description of Artificial Sequence: Synthetic primer
tcagtcctaaaacggttcgaca

SEQ ID NO: 9522 - DNA, 50 bp, Artificial Sequence; identical to SEQ ID NO: 968
  Description of Artificial Sequence: Synthetic primer
  Description of Combined DNA/RNA Molecule: Synthetic primer

SEQ ID NO: 9523 - DNA, 36 bp, Artificial Sequence; identical to SEQ ID NO: 1559
  Description of Artificial Sequence: Synthetic primer
  Description of Combined DNA/RNA Molecule: Synthetic primer

SEQ ID NO: 9524 - DNA, 36 bp, Artificial Sequence; identical to SEQ ID NO: 1560
  Description of Artificial Sequence: Synthetic primer
  Description of Combined DNA/RNA Molecule: Synthetic primer

SEQ ID NO: 9525 - DNA, 58 bp, Artificial Sequence; identical to SEQ ID NO: 1561
  Description of Artificial Sequence: Synthetic primer
  Description of Combined DNA/RNA Molecule: Synthetic primer

SEQ ID NO: 9526 - DNA, 48 bp, Artificial Sequence; identical to SEQ ID NO: 1562
  Description of Artificial Sequence: Synthetic oligonucleotide
  Description of Combined DNA/RNA Molecule: Synthetic oligonucleotide

SEQ ID NO: 9527 - DNA, 47 bp, Artificial Sequence; identical to SEQ ID NO: 1563
  Description of Artificial Sequence: Synthetic oligonucleotide

SEQ ID NO: 9528 - DNA, 25 bp, Artificial Sequence
  Description of Artificial Sequence: Synthetic probe
ttagcctcaccacccaggttcaagg

SEQ ID NO: 9529 - DNA, 22 bp, Artificial Sequence
  Description of Artificial Sequence: Synthetic primer
tcgatggtcaatgagcttcaca

SEQ ID NO: 9530 - DNA, 22 bp, Artificial Sequence
  Description of Artificial Sequence: Synthetic primer
tggagagggagatcacgtaaca

SEQ ID NO: 9531 - DNA, 54 bp, Artificial Sequence; identical to SEQ ID NO: 1567
  Description of Artificial Sequence: Synthetic primer
  Description of Combined DNA/RNA Molecule: Synthetic primer

SEQ ID NO: 9532 - DNA, 37 bp, Artificial Sequence; identical to SEQ ID NO: 3478
  Description of Artificial Sequence: Synthetic primer
  Description of Combined DNA/RNA Molecule: Synthetic primer

SEQ ID NO: 9533 - DNA, 36 bp, Artificial Sequence; identical to SEQ ID NO: 1560
  Description of Artificial Sequence: Synthetic primer
  Description of Combined DNA/RNA Molecule: Synthetic primer

SEQ ID NO: 9534 - DNA, 59 bp, Artificial Sequence; identical to SEQ ID NO: 3480
  Description of Artificial Sequence: Synthetic primer
  Description of Combined DNA/RNA Molecule: Synthetic primer

SEQ ID NO: 9535 - DNA, 45 bp, Artificial Sequence; identical to SEQ ID NO: 3481
  Description of Artificial Sequence: Synthetic oligonucleotide
  Description of Combined DNA/RNA Molecule: Synthetic oligonucleotide

SEQ ID NO: 9536 - DNA, 43 bp, Artificial Sequence; identical to SEQ ID NO: 3482
  Description of Artificial Sequence: Synthetic oligonucleotide

SEQ ID NO: 9537 - DNA, 23 bp, Artificial Sequence
  Description of Artificial Sequence: Synthetic probe
aacccatcaagccccaccaccca

SEQ ID NO: 9538 - DNA, 19 bp, Artificial Sequence
  Description of Artificial Sequence: Synthetic primer
tctgcccttcgcttcgaac

SEQ ID NO: 9539 - DNA, 20 bp, Artificial Sequence
  Description of Artificial Sequence: Synthetic primer
tagcatgccgaccatacaac

SEQ ID NO: 9540 - DNA, 54 bp, Artificial Sequence; identical to SEQ ID NO: 3486
  Description of Artificial Sequence: Synthetic primer
  Description of Combined DNA/RNA Molecule: Synthetic primer

SEQ ID NO: 9541 - DNA, 38 bp, Artificial Sequence; identical to SEQ ID NO: 5181
  Description of Artificial Sequence: Synthetic primer
  Description of Combined DNA/RNA Molecule: Synthetic primer

SEQ ID NO: 9542 - DNA, 42 bp, Artificial Sequence; identical to SEQ ID NO: 5182
  Description of Artificial Sequence: Synthetic primer
  Description of Combined DNA/RNA Molecule: Synthetic primer

SEQ ID NO: 9543 - DNA, 53 bp, Artificial Sequence; identical to SEQ ID NO: 5183
  Description of Artificial Sequence: Synthetic primer
  Description of Combined DNA/RNA Molecule: Synthetic primer

SEQ ID NO: 9544 - DNA, 45 bp, Artificial Sequence; identical to SEQ ID NO: 5184
  Description of Artificial Sequence: Synthetic oligonucleotide
  Description of Combined DNA/RNA Molecule: Synthetic oligonucleotide

SEQ ID NO: 9545 - DNA, 49 bp, Artificial Sequence; identical to SEQ ID NO: 5185
  Description of Artificial Sequence: Synthetic oligonucleotide

SEQ ID NO: 9546 - DNA, 28 bp, Artificial Sequence
  Description of Artificial Sequence: Synthetic probe
ttcagcccagtcccattatcccaagcac

SEQ ID NO: 9547 - DNA, 20 bp, Artificial Sequence
  Description of Artificial Sequence: Synthetic primer
tttgcctcttgtaggtgcca

SEQ ID NO: 9548 - DNA, 19 bp, Artificial Sequence
  Description of Artificial Sequence: Synthetic primer
tgaatatccgcgttgccca

SEQ ID NO: 9549 - DNA, 49 bp, Artificial Sequence; identical to SEQ ID NO: 5189
  Description of Artificial Sequence: Synthetic primer
  Description of Combined DNA/RNA Molecule: Synthetic primer

SEQ ID NO: 9550 - DNA, 40 bp, Artificial Sequence; identical to SEQ ID NO: 5575
  Description of Artificial Sequence: Synthetic primer
  Description of Combined DNA/RNA Molecule: Synthetic primer

SEQ ID NO: 9551 - DNA, 40 bp, Artificial Sequence; identical to SEQ ID NO: 5576
  Description of Artificial Sequence: Synthetic primer
  Description of Combined DNA/RNA Molecule: Synthetic primer

SEQ ID NO: 9552 - DNA, 50 bp, Artificial Sequence; identical to SEQ ID NO: 5577
  Description of Artificial Sequence: Synthetic primer
  Description of Combined DNA/RNA Molecule: Synthetic primer

SEQ ID NO: 9553 - DNA, 43 bp, Artificial Sequence; identical to SEQ ID NO: 5578
  Description of Artificial Sequence: Synthetic oligonucleotide
  Description of Combined DNA/RNA Molecule: Synthetic oligonucleotide

SEQ ID NO: 9554 - DNA, 47 bp, Artificial Sequence; identical to SEQ ID NO: 5579
  Description of Artificial Sequence: Synthetic oligonucleotide

SEQ ID NO: 9555 - DNA, 25 bp, Artificial Sequence
  Description of Artificial Sequence: Synthetic probe
ttgccaacacatggagggtgggagg

SEQ ID NO: 9556 - DNA, 20 bp, Artificial Sequence
  Description of Artificial Sequence: Synthetic primer
ttgtgcagagcgaacaacaa

SEQ ID NO: 9557 - DNA, 21 bp, Artificial Sequence
  Description of Artificial Sequence: Synthetic primer
tggcggtacaccaaatagcaa

SEQ ID NO: 9558 - DNA, 45 bp, Artificial Sequence; identical to SEQ ID NO: 5583
  Description of Artificial Sequence: Synthetic primer
  Description of Combined DNA/RNA Molecule: Synthetic primer

SEQ ID NO: 9559 - DNA, 35 bp, Artificial Sequence; identical to SEQ ID NO: 5851
  Description of Artificial Sequence: Synthetic primer
  Description of Combined DNA/RNA Molecule: Synthetic primer

SEQ ID NO: 9560 - DNA, 40 bp, Artificial Sequence; identical to SEQ ID NO: 5852
  Description of Artificial Sequence: Synthetic primer
  Description of Combined DNA/RNA Molecule: Synthetic primer

SEQ ID NO: 9561 - DNA, 48 bp, Artificial Sequence; identical to SEQ ID NO: 5853
  Description of Artificial Sequence: Synthetic primer
  Description of Combined DNA/RNA Molecule: Synthetic primer

SEQ ID NO: 9562 - DNA, 59 bp, Artificial Sequence; identical to SEQ ID NO: 5854
  Description of Artificial Sequence: Synthetic oligonucleotide
  Description of Combined DNA/RNA Molecule: Synthetic oligonucleotide

SEQ ID NO: 9563 - DNA, 42 bp, Artificial Sequence; identical to SEQ ID NO: 5855
  Description of Artificial Sequence: Synthetic oligonucleotide

SEQ ID NO: 9564 - DNA, 24 bp, Artificial Sequence
  Description of Artificial Sequence: Synthetic probe
ttggttccaaaagccaggtcccct

SEQ ID NO: 9565 - DNA, 19 bp, Artificial Sequence
  Description of Artificial Sequence: Synthetic primer
ttggtacgaggagggcaca

SEQ ID NO: 9566 - DNA, 19 bp, Artificial Sequence
  Description of Artificial Sequence: Synthetic primer
ttagtaagggcggcagaca

SEQ ID NO: 9567 - DNA, 43 bp, Artificial Sequence; identical to SEQ ID NO: 5859
  Description of Artificial Sequence: Synthetic primer
  Description of Combined DNA/RNA Molecule: Synthetic primer

SEQ ID NO: 9568 - DNA, 49 bp, Artificial Sequence; identical to SEQ ID NO: 5860
  Description of Artificial Sequence: Synthetic primer
  Description of Combined DNA/RNA Molecule: Synthetic primer

SEQ ID NO: 9569 - DNA, 49 bp, Artificial Sequence; identical to SEQ ID NO: 5861
  Description of Artificial Sequence: Synthetic primer
  Description of Combined DNA/RNA Molecule: Synthetic primer

SEQ ID NO: 9570 - DNA, 53 bp, Artificial Sequence; identical to SEQ ID NO: 5862
  Description of Artificial Sequence: Synthetic primer
  Description of Combined DNA/RNA Molecule: Synthetic primer

SEQ ID NO: 9571 - DNA, 49 bp, Artificial Sequence; identical to SEQ ID NO: 5863
  Description of Artificial Sequence: Synthetic oligonucleotide
  Description of Combined DNA/RNA Molecule: Synthetic oligonucleotide

SEQ ID NO: 9572 - DNA, 42 bp, Artificial Sequence; identical to SEQ ID NO: 5864
  Description of Artificial Sequence: Synthetic oligonucleotide

SEQ ID NO: 9573 - DNA, 25 bp, Artificial Sequence
  Description of Artificial Sequence: Synthetic probe
aaaatgacactctgggagccctgcc

SEQ ID NO: 9574 - DNA, 21 bp, Artificial Sequence
  Description of Artificial Sequence: Synthetic primer
tcagacgcactaaacaggcaa

SEQ ID NO: 9575 - DNA, 19 bp, Artificial Sequence
  Description of Artificial Sequence: Synthetic primer
ttcacacgacgatccgcaa

SEQ ID NO: 9576 - DNA, 44 bp, Artificial Sequence; identical to SEQ ID NO: 5868
  Description of Artificial Sequence: Synthetic primer
  Description of Combined DNA/RNA Molecule: Synthetic primer

SEQ ID NO: 9577 - DNA, 40 bp, Artificial Sequence; identical to SEQ ID NO: 5869
  Description of Artificial Sequence: Synthetic primer
  Description of Combined DNA/RNA Molecule: Synthetic primer

SEQ ID NO: 9578 - DNA, 40 bp, Artificial Sequence; identical to SEQ ID NO: 5870
  Description of Artificial Sequence: Synthetic primer
  Description of Combined DNA/RNA Molecule: Synthetic primer

SEQ ID NO: 9579 - DNA, 60 bp, Artificial Sequence; identical to SEQ ID NO: 5871
  Description of Artificial Sequence: Synthetic primer
  Description of Combined DNA/RNA Molecule: Synthetic primer

SEQ ID NO: 9580 - DNA, 46 bp, Artificial Sequence; identical to SEQ ID NO: 5872
  Description of Artificial Sequence: Synthetic oligonucleotide
  Description of Combined DNA/RNA Molecule: Synthetic oligonucleotide

SEQ ID NO: 9581 - DNA, 55 bp, Artificial Sequence; identical to SEQ ID NO: 5873
  Description of Artificial Sequence: Synthetic oligonucleotide

SEQ ID NO: 9582 - DNA, 29 bp, Artificial Sequence
  Description of Artificial Sequence: Synthetic probe
tttccctcacaggtaaactccaggcatcc

SEQ ID NO: 9583 - DNA, 20 bp, Artificial Sequence
  Description of Artificial Sequence: Synthetic primer
tctcaatgtcgagccgtacc

SEQ ID NO: 9584 - DNA, 19 bp, Artificial Sequence
  Description of Artificial Sequence: Synthetic primer
ttgagccagccgaagaacc

SEQ ID NO: 9585 - DNA, 37 bp, Artificial Sequence; identical to SEQ ID NO: 299
  Description of Artificial Sequence: Synthetic primer
  Description of Combined DNA/RNA Molecule: Synthetic primer

SEQ ID NO: 9586 - DNA, 39 bp, Artificial Sequence; identical to SEQ ID NO: 6371
  Description of Artificial Sequence: Synthetic primer
  Description of Combined DNA/RNA Molecule: Synthetic primer

SEQ ID NO: 9587 - DNA, 58 bp, Artificial Sequence; identical to SEQ ID NO: 6372
  Description of Artificial Sequence: Synthetic primer
  Description of Combined DNA/RNA Molecule: Synthetic primer

SEQ ID NO: 9588 - DNA, 53 bp, Artificial Sequence; identical to SEQ ID NO: 6373
  Description of Artificial Sequence: Synthetic oligonucleotide
  Description of Combined DNA/RNA Molecule: Synthetic oligonucleotide

SEQ ID NO: 9589 - DNA, 48 bp, Artificial Sequence; identical to SEQ ID NO: 6374
  Description of Artificial Sequence: Synthetic oligonucleotide

SEQ ID NO: 9590 - DNA, 28 bp, Artificial Sequence
  Description of Artificial Sequence: Synthetic probe
ttcaactcactctctgcaccccatccac

SEQ ID NO: 9591 - DNA, 22 bp, Artificial Sequence
  Description of Artificial Sequence: Synthetic primer
taagcctgcttttccgaaacaa

SEQ ID NO: 9592 - DNA, 21 bp, Artificial Sequence
  Description of Artificial Sequence: Synthetic primer
tgctatcctggcgcaatacaa

SEQ ID NO: 9593 - DNA, 53 bp, Artificial Sequence; identical to SEQ ID NO: 6378
  Description of Artificial Sequence: Synthetic primer
  Description of Combined DNA/RNA Molecule: Synthetic primer

SEQ ID NO: 9594 - DNA, 42 bp, Artificial Sequence
  Description of Artificial Sequence: Synthetic primer
  Description of Combined DNA/RNA Molecule: Synthetic primer
acgacgacgacgaatcctcttcctgcaaaagagaggcctgct

SEQ ID NO: 9595 - DNA, 43 bp, Artificial Sequence
  Description of Artificial Sequence: Synthetic primer
  Description of Combined DNA/RNA Molecule: Synthetic primer
acgacgacgacgaacttcctgcaaaagagaggcactgccccac

SEQ ID NO: 9596 - DNA, 46 bp, Artificial Sequence
  Description of Artificial Sequence: Synthetic primer
  Description of Combined DNA/RNA Molecule: Synthetic primer
acgacgacgacttgacgaacataatgctgggccctgtgggccttga

SEQ ID NO: 9597 - DNA, 51 bp, Artificial Sequence
  Description of Artificial Sequence: Synthetic oligonucleotide
  Description of Combined DNA/RNA Molecule: Synthetic oligonucleotide
ttgcaaaccacccggacaacccatgacctacacagactgagacgcaatcgt

SEQ ID NO: 9598 - DNA, 54 bp, Artificial Sequence
  Description of Artificial Sequence: Synthetic oligonucleotide
atcaccatgaatggagacctctggaaaagctcagttggtcagcatcgactccta

SEQ ID NO: 9599 - DNA, 30 bp, Artificial Sequence
  Description of Artificial Sequence: Synthetic probe
aaagacgcaatcaccatgaatggagacctc

SEQ ID NO: 9600 - DNA, 19 bp, Artificial Sequence
  Description of Artificial Sequence: Synthetic primer
ttgcaaaccacccggacaa

SEQ ID NO: 9601 - DNA, 20 bp, Artificial Sequence
  Description of Artificial Sequence: Synthetic primer
taggagtcgatgctgaccaa

SEQ ID NO: 9602 - DNA, 42 bp, Artificial Sequence
  Description of Artificial Sequence: Synthetic primer
  Description of Combined DNA/RNA Molecule: Synthetic primer
taggagtcgatgctgaccaatgggccctgtgggccctggctt

SEQ ID NO: 9603 - DNA, 43 bp, Artificial Sequence
  Description of Artificial Sequence: Synthetic primer
  Description of Combined DNA/RNA Molecule: Synthetic primer
acgacgacgacgaatcagtttagtcaccaccaccagcacctat

SEQ ID NO: 9604 - DNA, 45 bp, Artificial Sequence
  Description of Artificial Sequence: Synthetic primer
  Description of Combined DNA/RNA Molecule: Synthetic primer
acgacgacgacgaagtttagtcaccaccaccagcacctacutccc

SEQ ID NO: 9605 - DNA, 54 bp, Artificial Sequence
  Description of Artificial Sequence: Synthetic primer
  Description of Combined DNA/RNA Molecule: Synthetic primer
acgacgacgacttgacgaacataatcctgtgggagatctgccctgtacagtaac

SEQ ID NO: 9606 - DNA, 52 bp, Artificial Sequence
  Description of Artificial Sequence: Synthetic oligonucleotide
  Description of Combined DNA/RNA Molecule: Synthetic oligonucleotide
ttgcaaaccacccggacaacagggctgactttcaggaaatgatgtcagcctt

SEQ ID NO: 9607 - DNA, 51 bp, Artificial Sequence
  Description of Artificial Sequence: Synthetic oligonucleotide
gccccataagtcagggcaattaccagcagtgttggtcagcatcgactccta

SEQ ID NO: 9608 - DNA, 30 bp, Artificial Sequence
  Description of Artificial Sequence: Synthetic probe
ccgatgtcagccccataagtcagggcaatt

SEQ ID NO: 9609 - DNA, 19 bp, Artificial Sequence
  Description of Artificial Sequence: Synthetic primer
ttgcaaaccacccggacaa

SEQ ID NO: 9610 - DNA, 20 bp, Artificial Sequence
  Description of Artificial Sequence: Synthetic primer
taggagtcgatgctgaccaa

SEQ ID NO: 9611 - DNA, 53 bp, Artificial Sequence
  Description of Artificial Sequence: Synthetic primer
  Description of Combined DNA/RNA Molecule: Synthetic primer
taggagtcgatgctgaccaacctgtacagtaattctccttgcactgttggtag

SEQ ID NO: 9612 - DNA, 48 bp, Artificial Sequence
  Description of Artificial Sequence: Synthetic primer
  Description of Combined DNA/RNA Molecule: Synthetic primer
acgacgacgacgaacctgaaaccagatcttagtgtcagagccacccct

SEQ ID NO: 9613 - DNA, 52 bp, Artificial Sequence
  Description of Artificial Sequence: Synthetic primer
  Description of Combined DNA/RNA Molecule: Synthetic primer
acgacgacgacgaacatttgcatttcctgaaaccagatcttagtgtcagagt

SEQ ID NO: 9614 - DNA, 57 bp, Artificial Sequence
  Description of Artificial Sequence: Synthetic primer
  Description of Combined DNA/RNA Molecule: Synthetic primer
acgacgacgacttgacgaacataatcatgtccagtgtggtaaaggtgtaccagatga

SEQ ID NO: 9615 - DNA, 43 bp, Artificial Sequence
  Description of Artificial Sequence: Synthetic oligonucleotide
  Description of Combined DNA/RNA Molecule: Synthetic oligonucleotide
taagacgtatgctagcgccaaccccagccaggcagacaccttg

SEQ ID NO: 9616 - DNA, 44 bp, Artificial Sequence
  Description of Artificial Sequence: Synthetic oligonucleotide
cctcagccatggccctgcacaaggttggtcagcatcgactccta

SEQ ID NO: 9617 - DNA, 23 bp, Artificial Sequence
  Description of Artificial Sequence: Synthetic probe
ttgcagacacctcagccatggcc

SEQ ID NO: 9618 - DNA, 21 bp, Artificial Sequence
  Description of Artificial Sequence: Synthetic primer
taagacgtatgctagcgccaa

SEQ ID NO: 9619 - DNA, 20 bp, Artificial Sequence
  Description of Artificial Sequence: Synthetic primer
taggagtcgatgctgaccaa

SEQ ID NO: 9620 - DNA, 55 bp, Artificial Sequence
  Description of Artificial Sequence: Synthetic primer
  Description of Combined DNA/RNA Molecule: Synthetic primer
taggagtcgatgctgaccaatgtaccagatggacttgagcagttccttatgcaga

SEQ ID NO: 9621 - DNA, 41 bp, Artificial Sequence
  Description of Artificial Sequence: Synthetic primer
  Description of Combined DNA/RNA Molecule: Synthetic primer
acgacgacgacgaagaaggagctgaggagagccacacaata

SEQ ID NO: 9622 - DNA, 42 bp, Artificial Sequence
  Description of Artificial Sequence: Synthetic primer
  Description of Combined DNA/RNA Molecule: Synthetic primer
acgacgacgacgaagctgaggagagccacacaatggaaaccc

SEQ ID NO: 9623 - DNA, 52 bp, Artificial Sequence
  Description of Artificial Sequence: Synthetic primer
  Description of Combined DNA/RNA Molecule: Synthetic primer
acgacgacgacttgacgaacataatggtgtgaggagaggatgaaggagggag

SEQ ID NO: 9624 - DNA, 43 bp, Artificial Sequence
  Description of Artificial Sequence: Synthetic oligonucleotide
  Description of Combined DNA/RNA Molecule: Synthetic oligonucleotide
tacatgccatcccacgacaccaaaggcagggctggacacacct

SEQ ID NO: 9625 - DNA, 43 bp, Artificial Sequence
  Description of Artificial Sequence: Synthetic oligonucleotide
cactctcacagagccccccccacctgtgtcggagcggttacta

SEQ ID NO: 9626 - DNA, 26 bp, Artificial Sequence
  Description of Artificial Sequence: Synthetic probe
ttctggacacactctcacagagcccc

SEQ ID NO: 9627 - DNA, 19 bp, Artificial Sequence
  Description of Artificial Sequence: Synthetic primer
tacatgccatcccacgaca

SEQ ID NO: 9628 - DNA, 19 bp, Artificial Sequence
  Description of Artificial Sequence: Synthetic primer
tagtaaccgctccgacaca

SEQ ID NO: 9629 - DNA, 45 bp, Artificial Sequence
  Description of Artificial Sequence: Synthetic primer
  Description of Combined DNA/RNA Molecule: Synthetic primer
tagtaaccgctccgacacaggagggaaggaagggcaagatgggaa

SEQ ID NO: 9630 - DNA, 43 bp, Artificial Sequence
  Description of Artificial Sequence: Synthetic primer
  Description of Combined DNA/RNA Molecule: Synthetic primer
acgacgacgacgaatttcaggaaatgatgccagccccauaagc

SEQ ID NO: 9631 - DNA, 45 bp, Artificial Sequence
  Description of Artificial Sequence: Synthetic primer
  Description of Combined DNA/RNA Molecule: Synthetic primer
acgacgacgacgaaaggaaatgatgccagccccataagtcagggt

SEQ ID NO: 9632 - DNA, 50 bp, Artificial Sequence
  Description of Artificial Sequence: Synthetic primer
  Description of Combined DNA/RNA Molecule: Synthetic primer
acgacgacgacttgacgaacataatcctgtggtgaggcatgggtggggtc

SEQ ID NO: 9633 - DNA, 55 bp, Artificial Sequence
  Description of Artificial Sequence: Synthetic oligonucleotide
  Description of Combined DNA/RNA Molecule: Synthetic oligonucleotide
tccaaacaagctgatccgtacaccagcagtgcaaggagaattactgtgcagggtg

SEQ ID NO: 9634 - DNA, 47 bp, Artificial Sequence
  Description of Artificial Sequence: Synthetic oligonucleotide
gggcagatctcccacaggcactgtcaactgtgtcggagcggttacta

SEQ ID NO: 9635 - DNA, 26 bp, Artificial Sequence
  Description of Artificial Sequence: Synthetic probe
ccctgtgcagggcagatctcccacag

SEQ ID NO: 9636 - DNA, 22 bp, Artificial Sequence
  Description of Artificial Sequence: Synthetic primer
tccaaacaagctgatccgtaca

SEQ ID NO: 9637 - DNA, 19 bp, Artificial Sequence
  Description of Artificial Sequence: Synthetic primer
tagtaaccgctccgacaca

SEQ ID NO: 9638 - DNA, 47 bp, Artificial Sequence
  Description of Artificial Sequence: Synthetic primer
  Description of Combined DNA/RNA Molecule: Synthetic primer
tagtaaccgctccgacacagggtgaggttgtgtgttgacaatgccta

SEQ ID NO: 9639 - DNA, 49 bp, Artificial Sequence
  Description of Artificial Sequence: Synthetic primer
  Description of Combined DNA/RNA Molecule: Synthetic primer
acgacgacgacgaatacagcttaactgcactcatgatcatgacagggta

SEQ ID NO: 9640 - DNA, 47 bp, Artificial Sequence
  Description of Artificial Sequence: Synthetic primer
  Description of Combined DNA/RNA Molecule: Synthetic primer
acgacgacgacgaactgcactcatgatcatgacagggtgtgaucagt

SEQ ID NO: 9641 - DNA, 50 bp, Artificial Sequence
  Description of Artificial Sequence: Synthetic primer
  Description of Combined DNA/RNA Molecule: Synthetic primer
acgacgacgacttgacgaacataatgggttccactgaggtgctcagcttt

SEQ ID NO: 9642 - DNA, 48 bp, Artificial Sequence
  Description of Artificial Sequence: Synthetic oligonucleotide
  Description of Combined DNA/RNA Molecule: Synthetic oligonucleotide
tagggcgacagttaccacaaagcactccctgccaagacaagcagaagt

SEQ ID NO: 9643 - DNA, 54 bp, Artificial Sequence
  Description of Artificial Sequence: Synthetic oligonucleotide
gaaacatcatctaggagggagaatgctaggagggttgtgggtctcgctcgtata

SEQ ID NO: 9644 - DNA, 34 bp, Artificial Sequence
  Description of Artificial Sequence: Synthetic probe
ttacaagcagaaacatcatctaggagggagaatg

SEQ ID NO: 9645 - DNA, 20 bp, Artificial Sequence
  Description of Artificial Sequence: Synthetic primer
tagggcgacagttaccacaa

SEQ ID NO: 9646 - DNA, 20 bp, Artificial Sequence
  Description of Artificial Sequence: Synthetic primer
tatacgagcgagacccacaa

SEQ ID NO: 9647 - DNA, 46 bp, Artificial Sequence
  Description of Artificial Sequence: Synthetic primer
  Description of Combined DNA/RNA Molecule: Synthetic primer
tatacgagcgagacccacaagggtgctcagcttccaaggttggcac

SEQ ID NO: 9648 - DNA, 41 bp, Artificial Sequence; identical to SEQ ID NO: 9621
  Description of Artificial Sequence: Synthetic primer
  Description of Combined DNA/RNA Molecule: Synthetic primer

SEQ ID NO: 9649 - DNA, 42 bp, Artificial Sequence; identical to SEQ ID NO: 9622
  Description of Artificial Sequence: Synthetic primer
  Description of Combined DNA/RNA Molecule: Synthetic primer

SEQ ID NO: 9650 - DNA, 53 bp, Artificial Sequence
  Description of Artificial Sequence: Synthetic primer
  Description of Combined DNA/RNA Molecule: Synthetic primer
acgacgacgacttgacgaacataatgtgaggagaggatgaaggagggaaggag

SEQ ID NO: 9651 - DNA, 45 bp, Artificial Sequence
  Description of Artificial Sequence: Synthetic oligonucleotide
  Description of Combined DNA/RNA Molecule: Synthetic oligonucleotide
tcaaacaaaggcgaccacaacactgtgaggcccaaagacagggtc

SEQ ID NO: 9652 - DNA, 46 bp, Artificial Sequence
  Description of Artificial Sequence: Synthetic oligonucleotide
gggctgggcacactctcacagagcgttgtcgcataggcagttcata

SEQ ID NO: 9653 - DNA, 26 bp, Artificial Sequence
  Description of Artificial Sequence: Synthetic probe
ttaaagacagggctgggcacactctc

SEQ ID NO: 9654 - DNA, 21 bp, Artificial Sequence
  Description of Artificial Sequence: Synthetic primer
tcaaacaaaggcgaccacaac

SEQ ID NO: 9655 - DNA, 22 bp, Artificial Sequence
  Description of Artificial Sequence: Synthetic primer
tatgaactgcctatgcgacaac

SEQ ID NO: 9656 - DNA, 51 bp, Artificial Sequence
  Description of Artificial Sequence: Synthetic primer
  Description of Combined DNA/RNA Molecule: Synthetic primer
tatgaactgcctatgcgacaacgaaggagggaaggaagggcaagatgggaa

SEQ ID NO: 9657 - DNA, 39 bp, Artificial Sequence
  Description of Artificial Sequence: Synthetic primer
  Description of Combined DNA/RNA Molecule: Synthetic primer
acgacgacgacgaagcaccacccacactctggcacccat

SEQ ID NO: 9658 - DNA, 39 bp, Artificial Sequence
  Description of Artificial Sequence: Synthetic primer
  Description of Combined DNA/RNA Molecule: Synthetic primer
acgacgacgacgaagctgggcaccacccacactcuggcg

SEQ ID NO: 9659 - DNA, 55 bp, Artificial Sequence
  Description of Artificial Sequence: Synthetic primer
  Description of Combined DNA/RNA Molecule: Synthetic primer
acgacgacgacttgacgaacataattgtgtggtaggttgctgaagtgtgcutgct

SEQ ID NO: 9660 - DNA, 47 bp, Artificial Sequence
  Description of Artificial Sequence: Synthetic oligonucleotide
  Description of Combined DNA/RNA Molecule: Synthetic oligonucleotide
taaacaatgagacccgctgaacccacctgccaaacccagacactgtc

SEQ ID NO: 9661 - DNA, 54 bp, Artificial Sequence
  Description of Artificial Sequence: Synthetic oligonucleotide
ctgcttcatcttcctcaccaccaatctgtgccgttgtcgcataggcagttcata

SEQ ID NO: 9662 - DNA, 30 bp, Artificial Sequence
  Description of Artificial Sequence: Synthetic probe
ttccagacactgcttcatcttcctcaccac

SEQ ID NO: 9663 - DNA, 22 bp, Artificial Sequence
  Description of Artificial Sequence: Synthetic primer
taaacaatgagacccgctgaac

SEQ ID NO: 9664 - DNA, 22 bp, Artificial Sequence
  Description of Artificial Sequence: Synthetic primer
tatgaactgcctatgcgacaac

SEQ ID NO: 9665 - DNA, 50 bp, Artificial Sequence
  Description of Artificial Sequence: Synthetic primer
  Description of Combined DNA/RNA Molecule: Synthetic primer
tatgaactgcctatgcgacaacttgctgaagtgtgcttgcctgctgggag

SEQ ID NO: 9666 - DNA, 37 bp, Artificial Sequence
  Description of Artificial Sequence: Synthetic primer
  Description of Combined DNA/RNA Molecule: Synthetic primer
acgacgacgacgaacaggctgcacaaggcccagggat

SEQ ID NO: 9667 - DNA, 37 bp, Artificial Sequence
  Description of Artificial Sequence: Synthetic primer
  Description of Combined DNA/RNA Molecule: Synthetic primer
acgacgacgacgaaggcaggctgcacaaggcccagga

SEQ ID NO: 9668 - DNA, 50 bp, Artificial Sequence
  Description of Artificial Sequence: Synthetic primer
  Description of Combined DNA/RNA Molecule: Synthetic primer
acgacgacgacttgacgaacataatgggctgctgactctgaggccaggtt

SEQ ID NO: 9669 - DNA, 51 bp, Artificial Sequence
  Description of Artificial Sequence: Synthetic oligonucleotide
  Description of Combined DNA/RNA Molecule: Synthetic oligonucleotide
tccggatcaaagcagccaccagacactattcttgctgggagagtcaaacgt

SEQ ID NO: 9670 - DNA, 44 bp, Artificial Sequence
  Description of Artificial Sequence: Synthetic oligonucleotide
aacacacagcaccccatgtggagttgtgtgttggcgtacggtga

SEQ ID NO: 9671 - DNA, 27 bp, Artificial Sequence
  Description of Artificial Sequence: Synthetic probe
ttagagtcaaacacacagcaccccatg

SEQ ID NO: 9672 - DNA, 19 bp, Artificial Sequence
  Description of Artificial Sequence: Synthetic primer
tccggatcaaagcagccac

SEQ ID NO: 9673 - DNA, 19 bp, Artificial Sequence
  Description of Artificial Sequence: Synthetic primer
tcaccgtacgccaacacgc

SEQ ID NO: 9674 - DNA, 40 bp, Artificial Sequence
  Description of Artificial Sequence: Synthetic primer
  Description of Combined DNA/RNA Molecule: Synthetic primer
acgacgacgacgaaccactctctgcaccccatccactggt

SEQ ID NO: 9675 - DNA, 42 bp, Artificial Sequence
  Description of Artificial Sequence: Synthetic primer
  Description of Combined DNA/RNA Molecule: Synthetic primer
acgacgacgacgaacctgtcacaacccactctctgcaccccg

SEQ ID NO: 9676 - DNA, 51 bp, Artificial Sequence; identical to SEQ ID NO: 589
  Description of Artificial Sequence: Synthetic primer
  Description of Combined DNA/RNA Molecule: Synthetic primer

SEQ ID NO: 9677 - DNA, 47 bp, Artificial Sequence
  Description of Artificial Sequence: Synthetic oligonucleotide
  Description of Combined DNA/RNA Molecule: Synthetic oligonucleotide
tatgcggaccgatgactcaatggctctcacccctcagaggcactcgt

SEQ ID NO: 9678 - DNA, 52 bp, Artificial Sequence
  Description of Artificial Sequence: Synthetic oligonucleotide
ctcacccaacagcatagtacttgccacccattgcttggcttgatctacctga

SEQ ID NO: 9679 - DNA, 29 bp, Artificial Sequence
  Description of Artificial Sequence: Synthetic probe
aaagaggcactcacccaacagcatagtac

SEQ ID NO: 9680 - DNA, 20 bp, Artificial Sequence
  Description of Artificial Sequence: Synthetic primer
tatgcggaccgatgactcaa

SEQ ID NO: 9681 - DNA, 22 bp, Artificial Sequence
  Description of Artificial Sequence: Synthetic primer
tcaggtagatcaagccaagcaa

SEQ ID NO: 9682 - DNA, 47 bp, Artificial Sequence
  Description of Artificial Sequence: Synthetic primer
  Description of Combined DNA/RNA Molecule: Synthetic primer
tcaggtagatcaagccaagcaagtgtgtgggtgtggctggatggcag

SEQ ID NO: 9683 - DNA, 39 bp, Artificial Sequence
  Description of Artificial Sequence: Synthetic primer
  Description of Combined DNA/RNA Molecule: Synthetic primer
acgacgacgacgaaccccagcattgggtcagccagggcg

SEQ ID NO: 9684 - DNA, 39 bp, Artificial Sequence
  Description of Artificial Sequence: Synthetic primer
  Description of Combined DNA/RNA Molecule: Synthetic primer
acgacgacgacgaacagcattgggtcagccagggcagat

SEQ ID NO: 9685 - DNA, 56 bp, Artificial Sequence
  Description of Artificial Sequence: Synthetic primer
  Description of Combined DNA/RNA Molecule: Synthetic primer
acgacgacgacttgacgaacataatgccttagaggaagtaggtgctggtgguggta

SEQ ID NO: 9686 - DNA, 44 bp, Artificial Sequence
  Description of Artificial Sequence: Synthetic oligonucleotide
  Description of Combined DNA/RNA Molecule: Synthetic oligonucleotide
ttcgtgggcacacaagcaacagacagaggcagctcttcacccga

SEQ ID NO: 9687 - DNA, 55 bp, Artificial Sequence
  Description of Artificial Sequence: Synthetic oligonucleotide
cccagctgcatttgcatgtcagtttagtcaccattgcttggcttgatctacctga

SEQ ID NO: 9688 - DNA, 31 bp, Artificial Sequence
  Description of Artificial Sequence: Synthetic probe
ttctcttcacccagctgcatttgcatgtcag

SEQ ID NO: 9689 - DNA, 19 bp, Artificial Sequence
  Description of Artificial Sequence: Synthetic primer
ttcgtgggcacacaagcaa

SEQ ID NO: 9690 - DNA, 22 bp, Artificial Sequence
  Description of Artificial Sequence: Synthetic primer
tcaggtagatcaagccaagcaa

SEQ ID NO: 9691 - DNA, 53 bp, Artificial Sequence
  Description of Artificial Sequence: Synthetic primer
  Description of Combined DNA/RNA Molecule: Synthetic primer
tcaggtagatcaagccaagcaaccttagaggaagtaggtgctggtgatggtgg

SEQ ID NO: 9692 - DNA, 37 bp, Artificial Sequence
  Description of Artificial Sequence: Synthetic primer
  Description of Combined DNA/RNA Molecule: Synthetic primer
acgacgacgacgaagaggcagctctccacccagctgt

SEQ ID NO: 9693 - DNA, 39 bp, Artificial Sequence
  Description of Artificial Sequence: Synthetic primer
  Description of Combined DNA/RNA Molecule: Synthetic primer
acgacgacgacgaagcagctctccacccagctgcattta

SEQ ID NO: 9694 - DNA, 56 bp, Artificial Sequence
  Description of Artificial Sequence: Synthetic primer
  Description of Combined DNA/RNA Molecule: Synthetic primer
acgacgacgacttgacgaacataatctggtaattgccctgacttatgaggcuggcg

SEQ ID NO: 9695 - DNA, 51 bp, Artificial Sequence
  Description of Artificial Sequence: Synthetic oligonucleotide
  Description of Combined DNA/RNA Molecule: Synthetic oligonucleotide
ttgaaggaggaaatcggcacagtcagtttagtcaccaccaccaacacctgt

SEQ ID NO: 9696 - DNA, 55 bp, Artificial Sequence
  Description of Artificial Sequence: Synthetic oligonucleotide
cctacttcctctaaggccagggctgactttcagtgtcgaaccgttttaggactga

SEQ ID NO: 9697 - DNA, 30 bp, Artificial Sequence
  Description of Artificial Sequence: Synthetic probe
ttaccaacacctacttcctctaaggccagg

SEQ ID NO: 9698 - DNA, 21 bp, Artificial Sequence
  Description of Artificial Sequence: Synthetic primer
ttgaaggaggaaatcggcaca

SEQ ID NO: 9699 - DNA, 22 bp, Artificial Sequence
  Description of Artificial Sequence: Synthetic primer
tcagtcctaaaacggttcgaca

SEQ ID NO: 9700 - DNA, 52 bp, Artificial Sequence
  Description of Artificial Sequence: Synthetic primer
  Description of Combined DNA/RNA Molecule: Synthetic primer
tcagtcctaaaacggttcgacaggtaattgccctgacttatgggattggcac

SEQ ID NO: 9701 - DNA, 42 bp, Artificial Sequence
  Description of Artificial Sequence: Synthetic primer
  Description of Combined DNA/RNA Molecule: Synthetic primer
acgacgacgacgaacccaaagtcatccaccaccagcaccttt

SEQ ID NO: 9702 - DNA, 43 bp, Artificial Sequence
  Description of Artificial Sequence: Synthetic primer
  Description of Combined DNA/RNA Molecule: Synthetic primer
acgacgacgacgaaagacacccaaagtcatccaccaccagcat

SEQ ID NO: 9703 - DNA, 49 bp, Artificial Sequence
  Description of Artificial Sequence: Synthetic primer
  Description of Combined DNA/RNA Molecule: Synthetic primer
acgacgacgacttgacgaacataatccttcccctgcccaggcaautaac

SEQ ID NO: 9704 - DNA, 43 bp, Artificial Sequence
  Description of Artificial Sequence: Synthetic oligonucleotide
  Description of Combined DNA/RNA Molecule: Synthetic oligonucleotide
ttcggcaggctacggtacaccagcagcctcctcagacaacaat

SEQ ID NO: 9705 - DNA, 47 bp, Artificial Sequence
  Description of Artificial Sequence: Synthetic oligonucleotide
acagcactccaggagccccactcactgtcgaaccgttttaggactga

SEQ ID NO: 9706 - DNA, 26 bp, Artificial Sequence
  Description of Artificial Sequence: Synthetic probe
tttcagacaacagcactccaggagcc

SEQ ID NO: 9707 - DNA, 19 bp, Artificial Sequence
  Description of Artificial Sequence: Synthetic primer
ttcggcaggctacggtaca

SEQ ID NO: 9708 - DNA, 22 bp, Artificial Sequence
  Description of Artificial Sequence: Synthetic primer
tcagtcctaaaacggttcgaca

SEQ ID NO: 9709 - DNA, 55 bp, Artificial Sequence
  Description of Artificial Sequence: Synthetic primer
  Description of Combined DNA/RNA Molecule: Synthetic primer
tcagtcctaaaacggttcgacaggcaattaattggaagcaacacttgtatgagta

SEQ ID NO: 9710 - DNA, 39 bp, Artificial Sequence; identical to SEQ ID NO: 1322
  Description of Artificial Sequence: Synthetic primer
  Description of Combined DNA/RNA Molecule: Synthetic primer

SEQ ID NO: 9711 - DNA, 40 bp, Artificial Sequence; identical to SEQ ID NO: 1323
  Description of Artificial Sequence: Synthetic primer
  Description of Combined DNA/RNA Molecule: Synthetic primer

SEQ ID NO: 9712 - DNA, 55 bp, Artificial Sequence; identical to SEQ ID NO: 1324
  Description of Artificial Sequence: Synthetic primer
  Description of Combined DNA/RNA Molecule: Synthetic primer

SEQ ID NO: 9713 - DNA, 43 bp, Artificial Sequence; identical to SEQ ID NO: 1325
  Description of Artificial Sequence: Synthetic oligonucleotide
  Description of Combined DNA/RNA Molecule: Synthetic oligonucleotide

SEQ ID NO: 9714 - DNA, 43 bp, Artificial Sequence; identical to SEQ ID NO: 1326
  Description of Artificial Sequence: Synthetic oligonucleotide

SEQ ID NO: 9715 - DNA, 23 bp, Artificial Sequence
  Description of Artificial Sequence: Synthetic probe
ttaaggtcatggccctcacctgc

SEQ ID NO: 9716 - DNA, 19 bp, Artificial Sequence
  Description of Artificial Sequence: Synthetic primer
tagccgatggcgtaaaacc

SEQ ID NO: 9717 - DNA, 20 bp, Artificial Sequence
  Description of Artificial Sequence: Synthetic primer
tgcgagcaagtcatacgacc

SEQ ID NO: 9718 - DNA, 45 bp, Artificial Sequence; identical to SEQ ID NO: 1330
  Description of Artificial Sequence: Synthetic primer
  Description of Combined DNA/RNA Molecule: Synthetic primer

SEQ ID NO: 9719 - DNA, 25 bp, Artificial Sequence
  Description of Artificial Sequence: Synthetic primer
  Description of Combined DNA/RNA Molecule: Synthetic primer
acgacgacgacttgacgaacataac

SEQ ID NO: 9720 - DNA, 36 bp, Artificial Sequence; identical to SEQ ID NO: 1331
  Description of Artificial Sequence: Synthetic primer
  Description of Combined DNA/RNA Molecule: Synthetic primer

SEQ ID NO: 9721 - DNA, 42 bp, Artificial Sequence; identical to SEQ ID NO: 1332
  Description of Artificial Sequence: Synthetic primer
  Description of Combined DNA/RNA Molecule: Synthetic primer

SEQ ID NO: 9722 - DNA, 56 bp, Artificial Sequence; identical to SEQ ID NO: 1333
  Description of Artificial Sequence: Synthetic primer
  Description of Combined DNA/RNA Molecule: Synthetic primer

SEQ ID NO: 9723 - DNA, 45 bp, Artificial Sequence; identical to SEQ ID NO: 1334
  Description of Artificial Sequence: Synthetic oligonucleotide
  Description of Combined DNA/RNA Molecule: Synthetic oligonucleotide

SEQ ID NO: 9724 - DNA, 47 bp, Artificial Sequence; identical to SEQ ID NO: 1335
  Description of Artificial Sequence: Synthetic oligonucleotide

SEQ ID NO: 9725 - DNA, 29 bp, Artificial Sequence
  Description of Artificial Sequence: Synthetic probe
ttgtgaacatcaagtgagaggccacacac

SEQ ID NO: 9726 - DNA, 19 bp, Artificial Sequence
  Description of Artificial Sequence: Synthetic primer
ttacaggccgcatagcaac

SEQ ID NO: 9727 - DNA, 19 bp, Artificial Sequence
  Description of Artificial Sequence: Synthetic primer
tgcgagcccatgtctcaac

SEQ ID NO: 9728 - DNA, 49 bp, Artificial Sequence; identical to SEQ ID NO: 1339
  Description of Artificial Sequence: Synthetic primer
  Description of Combined DNA/RNA Molecule: Synthetic primer

SEQ ID NO: 9729 - DNA, 39 bp, Artificial Sequence; identical to SEQ ID NO: 1340
  Description of Artificial Sequence: Synthetic primer
  Description of Combined DNA/RNA Molecule: Synthetic primer

SEQ ID NO: 9730 - DNA, 43 bp, Artificial Sequence; identical to SEQ ID NO: 1341
  Description of Artificial Sequence: Synthetic primer
  Description of Combined DNA/RNA Molecule: Synthetic primer

SEQ ID NO: 9731 - DNA, 48 bp, Artificial Sequence; identical to SEQ ID NO: 1342
  Description of Artificial Sequence: Synthetic primer
  Description of Combined DNA/RNA Molecule: Synthetic primer

SEQ ID NO: 9732 - DNA, 41 bp, Artificial Sequence; identical to SEQ ID NO: 1343
  Description of Artificial Sequence: Synthetic oligonucleotide
  Description of Combined DNA/RNA Molecule: Synthetic oligonucleotide

SEQ ID NO: 9733 - DNA, 47 bp, Artificial Sequence; identical to SEQ ID NO: 1344
  Description of Artificial Sequence: Synthetic oligonucleotide

SEQ ID NO: 9734 - DNA, 28 bp, Artificial Sequence
  Description of Artificial Sequence: Synthetic probe
ttgaggacactccagtcatgtgcccagg

SEQ ID NO: 9735 - DNA, 19 bp, Artificial Sequence
  Description of Artificial Sequence: Synthetic primer
ttcgcctaccgcagtgaac

SEQ ID NO: 9736 - DNA, 19 bp, Artificial Sequence
  Description of Artificial Sequence: Synthetic primer
tgcgagcccatgtctcaac

SEQ ID NO: 9737 - DNA, 41 bp, Artificial Sequence; identical to SEQ ID NO: 1348
  Description of Artificial Sequence: Synthetic primer
  Description of Combined DNA/RNA Molecule: Synthetic primer

SEQ ID NO: 9738 - DNA, 43 bp, Artificial Sequence; identical to SEQ ID NO: 1542
  Description of Artificial Sequence: Synthetic primer
  Description of Combined DNA/RNA Molecule: Synthetic primer

SEQ ID NO: 9739 - DNA, 63 bp, Artificial Sequence; identical to SEQ ID NO: 1543
  Description of Artificial Sequence: Synthetic primer
  Description of Combined DNA/RNA Molecule: Synthetic primer

SEQ ID NO: 9740 - DNA, 47 bp, Artificial Sequence; identical to SEQ ID NO: 1544
  Description of Artificial Sequence: Synthetic oligonucleotide
  Description of Combined DNA/RNA Molecule: Synthetic oligonucleotide

SEQ ID NO: 9741 - DNA, 45 bp, Artificial Sequence; identical to SEQ ID NO: 1545
  Description of Artificial Sequence: Synthetic oligonucleotide

SEQ ID NO: 9742 - DNA, 25 bp, Artificial Sequence
  Description of Artificial Sequence: Synthetic probe
aagcattcagccaggttggccctca

SEQ ID NO: 9743 - DNA, 20 bp, Artificial Sequence
  Description of Artificial Sequence: Synthetic primer
taaccgggcctaaagtgaca

SEQ ID NO: 9744 - DNA, 22 bp, Artificial Sequence
  Description of Artificial Sequence: Synthetic primer
tggagagggagatcacgtaaca

SEQ ID NO: 9745 - DNA, 53 bp, Artificial Sequence; identical to SEQ ID NO: 1549
  Description of Artificial Sequence: Synthetic primer
  Description of Combined DNA/RNA Molecule: Synthetic primer

SEQ ID NO: 9746 - DNA, 44 bp, Artificial Sequence; identical to SEQ ID NO: 1550
  Description of Artificial Sequence: Synthetic primer
  Description of Combined DNA/RNA Molecule: Synthetic primer

SEQ ID NO: 9747 - DNA, 40 bp, Artificial Sequence; identical to SEQ ID NO: 1551
  Description of Artificial Sequence: Synthetic primer
  Description of Combined DNA/RNA Molecule: Synthetic primer

SEQ ID NO: 9748 - DNA, 48 bp, Artificial Sequence; identical to SEQ ID NO: 1552
  Description of Artificial Sequence: Synthetic primer
  Description of Combined DNA/RNA Molecule: Synthetic primer

SEQ ID NO: 9749 - DNA, 46 bp, Artificial Sequence; identical to SEQ ID NO: 1553
  Description of Artificial Sequence: Synthetic oligonucleotide
  Description of Combined DNA/RNA Molecule: Synthetic oligonucleotide

SEQ ID NO: 9750 - DNA, 44 bp, Artificial Sequence; identical to SEQ ID NO: 1554
  Description of Artificial Sequence: Synthetic oligonucleotide

SEQ ID NO: 9751 - DNA, 26 bp, Artificial Sequence
  Description of Artificial Sequence: Synthetic probe
ttcatgacacaggagcagcatgggtc

SEQ ID NO: 9752 - DNA, 22 bp, Artificial Sequence
  Description of Artificial Sequence: Synthetic primer
tcgatggtcaatgagcttcaca

SEQ ID NO: 9753 - DNA, 22 bp, Artificial Sequence
  Description of Artificial Sequence: Synthetic primer
tggagagggagatcacgtaaca

SEQ ID NO: 9754 - DNA, 45 bp, Artificial Sequence; identical to SEQ ID NO: 1558
  Description of Artificial Sequence: Synthetic primer
  Description of Combined DNA/RNA Molecule: Synthetic primer

SEQ ID NO: 9755 - DNA, 36 bp, Artificial Sequence; identical to SEQ ID NO: 1595
  Description of Artificial Sequence: Synthetic primer
  Description of Combined DNA/RNA Molecule: Synthetic primer

SEQ ID NO: 9756 - DNA, 39 bp, Artificial Sequence; identical to SEQ ID NO: 1596
  Description of Artificial Sequence: Synthetic primer
  Description of Combined DNA/RNA Molecule: Synthetic primer

SEQ ID NO: 9757 - DNA, 54 bp, Artificial Sequence; identical to SEQ ID NO: 1597
  Description of Artificial Sequence: Synthetic primer
  Description of Combined DNA/RNA Molecule: Synthetic primer

SEQ ID NO: 9758 - DNA, 45 bp, Artificial Sequence; identical to SEQ ID NO: 1598
  Description of Artificial Sequence: Synthetic oligonucleotide
  Description of Combined DNA/RNA Molecule: Synthetic oligonucleotide

SEQ ID NO: 9759 - DNA, 52 bp, Artificial Sequence; identical to SEQ ID NO: 1599
  Description of Artificial Sequence: Synthetic oligonucleotide

SEQ ID NO: 9760 - DNA, 33 bp, Artificial Sequence; identical to SEQ ID NO: 1600
  Description of Artificial Sequence: Synthetic probe

SEQ ID NO: 9761 - DNA, 21 bp, Artificial Sequence
  Description of Artificial Sequence: Synthetic primer
tcacagagacttgccgatcac

SEQ ID NO: 9762 - DNA, 22 bp, Artificial Sequence
  Description of Artificial Sequence: Synthetic primer
tggccatgtctaagctacacac

SEQ ID NO: 9763 - DNA, 44 bp, Artificial Sequence; identical to SEQ ID NO: 1603
  Description of Artificial Sequence: Synthetic primer
  Description of Combined DNA/RNA Molecule: Synthetic primer

SEQ ID NO: 9764 - DNA, 38 bp, Artificial Sequence; identical to SEQ ID NO: 1934
  Description of Artificial Sequence: Synthetic primer
  Description of Combined DNA/RNA Molecule: Synthetic primer

SEQ ID NO: 9765 - DNA, 40 bp, Artificial Sequence; identical to SEQ ID NO: 1935
  Description of Artificial Sequence: Synthetic primer
  Description of Combined DNA/RNA Molecule: Synthetic primer

SEQ ID NO: 9766 - DNA, 52 bp, Artificial Sequence; identical to SEQ ID NO: 1936
  Description of Artificial Sequence: Synthetic primer
  Description of Combined DNA/RNA Molecule: Synthetic primer

SEQ ID NO: 9767 - DNA, 53 bp, Artificial Sequence; identical to SEQ ID NO: 1937
  Description of Artificial Sequence: Synthetic oligonucleotide
  Description of Combined DNA/RNA Molecule: Synthetic oligonucleotide

SEQ ID NO: 9768 - DNA, 49 bp, Artificial Sequence; identical to SEQ ID NO: 1938
  Description of Artificial Sequence: Synthetic oligonucleotide

SEQ ID NO: 9769 - DNA, 29 bp, Artificial Sequence
  Description of Artificial Sequence: Synthetic probe
cctttcgcatggtggaatcctccacatct

SEQ ID NO: 9770 - DNA, 19 bp, Artificial Sequence
  Description of Artificial Sequence: Synthetic primer
tcctcgagccgatgacaca

SEQ ID NO: 9771 - DNA, 19 bp, Artificial Sequence
  Description of Artificial Sequence: Synthetic primer
ttagcccacggacgttaca

SEQ ID NO: 9772 - DNA, 46 bp, Artificial Sequence; identical to SEQ ID NO: 1942
  Description of Artificial Sequence: Synthetic primer
  Description of Combined DNA/RNA Molecule: Synthetic primer

SEQ ID NO: 9773 - DNA, 48 bp, Artificial Sequence; identical to SEQ ID NO: 1943
  Description of Artificial Sequence: Synthetic primer
  Description of Combined DNA/RNA Molecule: Synthetic primer

SEQ ID NO: 9774 - DNA, 49 bp, Artificial Sequence; identical to SEQ ID NO: 1944
  Description of Artificial Sequence: Synthetic primer
  Description of Combined DNA/RNA Molecule: Synthetic primer

SEQ ID NO: 9775 - DNA, 53 bp, Artificial Sequence; identical to SEQ ID NO: 1945
  Description of Artificial Sequence: Synthetic primer
  Description of Combined DNA/RNA Molecule: Synthetic primer

SEQ ID NO: 9776 - DNA, 48 bp, Artificial Sequence; identical to SEQ ID NO: 1946
  Description of Artificial Sequence: Synthetic oligonucleotide
  Description of Combined DNA/RNA Molecule: Synthetic oligonucleotide

SEQ ID NO: 9777 - DNA, 47 bp, Artificial Sequence; identical to SEQ ID NO: 1947
  Description of Artificial Sequence: Synthetic oligonucleotide

SEQ ID NO: 9778 - DNA, 31 bp, Artificial Sequence; identical to SEQ ID NO: 1948
  Description of Artificial Sequence: Synthetic probe

SEQ ID NO: 9779 - DNA, 21 bp, Artificial Sequence
  Description of Artificial Sequence: Synthetic primer
tactatcgtatcacgccgaca

SEQ ID NO: 9780 - DNA, 19 bp, Artificial Sequence
  Description of Artificial Sequence: Synthetic primer
ttagcccacggacgttaca

SEQ ID NO: 9781 - DNA, 47 bp, Artificial Sequence; identical to SEQ ID NO: 1951
  Description of Artificial Sequence: Synthetic primer
  Description of Combined DNA/RNA Molecule: Synthetic primer

SEQ ID NO: 9782 - DNA, 41 bp, Artificial Sequence; identical to SEQ ID NO: 3947
  Description of Artificial Sequence: Synthetic primer
  Description of Combined DNA/RNA Molecule: Synthetic primer

SEQ ID NO: 9783 - DNA, 43 bp, Artificial Sequence; identical to SEQ ID NO: 3948
  Description of Artificial Sequence: Synthetic primer
  Description of Combined DNA/RNA Molecule: Synthetic primer

SEQ ID NO: 9784 - DNA, 59 bp, Artificial Sequence; identical to SEQ ID NO: 3949
  Description of Artificial Sequence: Synthetic primer
  Description of Combined DNA/RNA Molecule: Synthetic primer

SEQ ID NO: 9785 - DNA, 60 bp, Artificial Sequence; identical to SEQ ID NO: 3950
  Description of Artificial Sequence: Synthetic oligonucleotide
  Description of Combined DNA/RNA Molecule: Synthetic oligonucleotide

SEQ ID NO: 9786 - DNA, 46 bp, Artificial Sequence; identical to SEQ ID NO: 3951
  Description of Artificial Sequence: Synthetic oligonucleotide

SEQ ID NO: 9787 - DNA, 25 bp, Artificial Sequence
  Description of Artificial Sequence: Synthetic probe
aacaccgcagcaggagagctgagag

SEQ ID NO: 9788 - DNA, 22 bp, Artificial Sequence
  Description of Artificial Sequence: Synthetic primer
tatctcctaaaagaagccgcac

SEQ ID NO: 9789 - DNA, 20 bp, Artificial Sequence
  Description of Artificial Sequence: Synthetic primer
tccatcgcccttaatcccac

SEQ ID NO: 9790 - DNA, 48 bp, Artificial Sequence; identical to SEQ ID NO: 3955
  Description of Artificial Sequence: Synthetic primer
  Description of Combined DNA/RNA Molecule: Synthetic primer

SEQ ID NO: 9791 - DNA, 38 bp, Artificial Sequence; identical to SEQ ID NO: 5172
  Description of Artificial Sequence: Synthetic primer
  Description of Combined DNA/RNA Molecule: Synthetic primer

SEQ ID NO: 9792 - DNA, 37 bp, Artificial Sequence; identical to SEQ ID NO: 5173
  Description of Artificial Sequence: Synthetic primer
  Description of Combined DNA/RNA Molecule: Synthetic primer

SEQ ID NO: 9793 - DNA, 47 bp, Artificial Sequence; identical to SEQ ID NO: 5174
  Description of Artificial Sequence: Synthetic primer
  Description of Combined DNA/RNA Molecule: Synthetic primer

SEQ ID NO: 9794 - DNA, 46 bp, Artificial Sequence; identical to SEQ ID NO: 5175
  Description of Artificial Sequence: Synthetic oligonucleotide
  Description of Combined DNA/RNA Molecule: Synthetic oligonucleotide

SEQ ID NO: 9795 - DNA, 49 bp, Artificial Sequence; identical to SEQ ID NO: 5176
  Description of Artificial Sequence: Synthetic oligonucleotide

SEQ ID NO: 9796 - DNA, 22 bp, Artificial Sequence
  Description of Artificial Sequence: Synthetic probe
tttggcgcagagcacacagctg

SEQ ID NO: 9797 - DNA, 20 bp, Artificial Sequence
  Description of Artificial Sequence: Synthetic primer
tatggactgtaccagcccaa

SEQ ID NO: 9798 - DNA, 21 bp, Artificial Sequence
  Description of Artificial Sequence: Synthetic primer
tgaacaccgcctcagtttcaa

SEQ ID NO: 9799 - DNA, 48 bp, Artificial Sequence; identical to SEQ ID NO: 5180
  Description of Artificial Sequence: Synthetic primer
  Description of Combined DNA/RNA Molecule: Synthetic primer

SEQ ID NO: 9800 - DNA, 37 bp, Artificial Sequence; identical to SEQ ID NO: 5199
  Description of Artificial Sequence: Synthetic primer
  Description of Combined DNA/RNA Molecule: Synthetic primer

SEQ ID NO: 9801 - DNA, 38 bp, Artificial Sequence; identical to SEQ ID NO: 5200
  Description of Artificial Sequence: Synthetic primer
  Description of Combined DNA/RNA Molecule: Synthetic primer

SEQ ID NO: 9802 - DNA, 54 bp, Artificial Sequence; identical to SEQ ID NO: 5201
  Description of Artificial Sequence: Synthetic primer
  Description of Combined DNA/RNA Molecule: Synthetic primer

SEQ ID NO: 9803 - DNA, 46 bp, Artificial Sequence; identical to SEQ ID NO: 5202
  Description of Artificial Sequence: Synthetic oligonucleotide
  Description of Combined DNA/RNA Molecule: Synthetic oligonucleotide

SEQ ID NO: 9804 - DNA, 55 bp, Artificial Sequence; identical to SEQ ID NO: 5203
  Description of Artificial Sequence: Synthetic oligonucleotide

SEQ ID NO: 9805 - DNA, 31 bp, Artificial Sequence; identical to SEQ ID NO: 5204
  Description of Artificial Sequence: Synthetic probe

SEQ ID NO: 9806 - DNA, 22 bp, Artificial Sequence
  Description of Artificial Sequence: Synthetic primer
tgtgcactagtccacgtgaaac

SEQ ID NO: 9807 - DNA, 22 bp, Artificial Sequence
  Description of Artificial Sequence: Synthetic primer
tgaatgcaaagatcgcggaaac

SEQ ID NO: 9808 - DNA, 52 bp, Artificial Sequence; identical to SEQ ID NO: 5207
  Description of Artificial Sequence: Synthetic primer
  Description of Combined DNA/RNA Molecule: Synthetic primer

SEQ ID NO: 9809 - DNA, 37 bp, Artificial Sequence; identical to SEQ ID NO: 5243
  Description of Artificial Sequence: Synthetic primer
  Description of Combined DNA/RNA Molecule: Synthetic primer

SEQ ID NO: 9810 - DNA, 38 bp, Artificial Sequence; identical to SEQ ID NO: 5244
  Description of Artificial Sequence: Synthetic primer
  Description of Combined DNA/RNA Molecule: Synthetic primer

SEQ ID NO: 9811 - DNA, 53 bp, Artificial Sequence; identical to SEQ ID NO: 5245
  Description of Artificial Sequence: Synthetic primer
  Description of Combined DNA/RNA Molecule: Synthetic primer

SEQ ID NO: 9812 - DNA, 46 bp, Artificial Sequence; identical to SEQ ID NO: 5246
  Description of Artificial Sequence: Synthetic oligonucleotide
  Description of Combined DNA/RNA Molecule: Synthetic oligonucleotide

SEQ ID NO: 9813 - DNA, 43 bp, Artificial Sequence; identical to SEQ ID NO: 5247
  Description of Artificial Sequence: Synthetic oligonucleotide

SEQ ID NO: 9814 - DNA, 23 bp, Artificial Sequence
  Description of Artificial Sequence: Synthetic probe
ttctgaacaggtggagctgcagc

SEQ ID NO: 9815 - DNA, 22 bp, Artificial Sequence
  Description of Artificial Sequence: Synthetic primer
tatcgcatcaaatggagagcaa

SEQ ID NO: 9816 - DNA, 22 bp, Artificial Sequence
  Description of Artificial Sequence: Synthetic primer
tgcaacgtataacagcggtcaa

SEQ ID NO: 9817 - DNA, 50 bp, Artificial Sequence; identical to SEQ ID NO: 5251
  Description of Artificial Sequence: Synthetic primer
  Description of Combined DNA/RNA Molecule: Synthetic primer

SEQ ID NO: 9818 - DNA, 38 bp, Artificial Sequence; identical to SEQ ID NO: 5279
  Description of Artificial Sequence: Synthetic primer
  Description of Combined DNA/RNA Molecule: Synthetic primer

SEQ ID NO: 9819 - DNA, 39 bp, Artificial Sequence; identical to SEQ ID NO: 5280
  Description of Artificial Sequence: Synthetic primer
  Description of Combined DNA/RNA Molecule: Synthetic primer

SEQ ID NO: 9820 - DNA, 46 bp, Artificial Sequence; identical to SEQ ID NO: 5281
  Description of Artificial Sequence: Synthetic primer
  Description of Combined DNA/RNA Molecule: Synthetic primer

SEQ ID NO: 9821 - DNA, 43 bp, Artificial Sequence; identical to SEQ ID NO: 5282
  Description of Artificial Sequence: Synthetic oligonucleotide
  Description of Combined DNA/RNA Molecule: Synthetic oligonucleotide

SEQ ID NO: 9822 - DNA, 41 bp, Artificial Sequence; identical to SEQ ID NO: 5283
  Description of Artificial Sequence: Synthetic oligonucleotide

SEQ ID NO: 9823 - DNA, 20 bp, Artificial Sequence
  Description of Artificial Sequence: Synthetic probe
ttagggccagggcacaggag

SEQ ID NO: 9824 - DNA, 20 bp, Artificial Sequence
  Description of Artificial Sequence: Synthetic primer
taccctcctagctccgtaca

SEQ ID NO: 9825 - DNA, 19 bp, Artificial Sequence
  Description of Artificial Sequence: Synthetic primer
tgcaccaccagacaacaca

SEQ ID NO: 9826 - DNA, 41 bp, Artificial Sequence; identical to SEQ ID NO: 5287
  Description of Artificial Sequence: Synthetic primer
  Description of Combined DNA/RNA Molecule: Synthetic primer

SEQ ID NO: 9827 - DNA, 48 bp, Artificial Sequence; identical to SEQ ID NO: 5288
  Description of Artificial Sequence: Synthetic primer
  Description of Combined DNA/RNA Molecule: Synthetic primer

SEQ ID NO: 9828 - DNA, 46 bp, Artificial Sequence; identical to SEQ ID NO: 5289
  Description of Artificial Sequence: Synthetic primer
  Description of Combined DNA/RNA Molecule: Synthetic primer

SEQ ID NO: 9829 - DNA, 52 bp, Artificial Sequence; identical to SEQ ID NO: 5290
  Description of Artificial Sequence: Synthetic primer
  Description of Combined DNA/RNA Molecule: Synthetic primer

SEQ ID NO: 9830 - DNA, 47 bp, Artificial Sequence; identical to SEQ ID NO: 5291
  Description of Artificial Sequence: Synthetic oligonucleotide
  Description of Combined DNA/RNA Molecule: Synthetic oligonucleotide

SEQ ID NO: 9831 - DNA, 50 bp, Artificial Sequence; identical to SEQ ID NO: 5292
  Description of Artificial Sequence: Synthetic oligonucleotide

SEQ ID NO: 9832 - DNA, 29 bp, Artificial Sequence
  Description of Artificial Sequence: Synthetic probe
aactcttcagcaggtagcacaccttgtcc

SEQ ID NO: 9833 - DNA, 21 bp, Artificial Sequence
  Description of Artificial Sequence: Synthetic primer
tcatcgccctcagatcttcca

SEQ ID NO: 9834 - DNA, 21 bp, Artificial Sequence
  Description of Artificial Sequence: Synthetic primer
tgccctccaatctatcctcca

SEQ ID NO: 9835 - DNA, 47 bp, Artificial Sequence; identical to SEQ ID NO: 5296
  Description of Artificial Sequence: Synthetic primer
  Description of Combined DNA/RNA Molecule: Synthetic primer

SEQ ID NO: 9836 - DNA, 40 bp, Artificial Sequence; identical to SEQ ID NO: 5306
  Description of Artificial Sequence: Synthetic primer
  Description of Combined DNA/RNA Molecule: Synthetic primer

SEQ ID NO: 9837 - DNA, 40 bp, Artificial Sequence; identical to SEQ ID NO: 5307
  Description of Artificial Sequence: Synthetic primer
  Description of Combined DNA/RNA Molecule: Synthetic primer

SEQ ID NO: 9838 - DNA, 51 bp, Artificial Sequence; identical to SEQ ID NO: 5308
  Description of Artificial Sequence: Synthetic primer
  Description of Combined DNA/RNA Molecule: Synthetic primer

SEQ ID NO: 9839 - DNA, 50 bp, Artificial Sequence; identical to SEQ ID NO: 5309
  Description of Artificial Sequence: Synthetic oligonucleotide
  Description of Combined DNA/RNA Molecule: Synthetic oligonucleotide

SEQ ID NO: 9840 - DNA, 47 bp, Artificial Sequence; identical to SEQ ID NO: 5310
  Description of Artificial Sequence: Synthetic oligonucleotide

SEQ ID NO: 9841 - DNA, 28 bp, Artificial Sequence
  Description of Artificial Sequence: Synthetic probe
ttgcaaacaggcacaccagagaacccaa

SEQ ID NO: 9842 - DNA, 19 bp, Artificial Sequence
  Description of Artificial Sequence: Synthetic primer
tcgcaccggaattctgacc

SEQ ID NO: 9843 - DNA, 20 bp, Artificial Sequence
  Description of Artificial Sequence: Synthetic primer
tgccgtcatgggaaactacc

SEQ ID NO: 9844 - DNA, 45 bp, Artificial Sequence; identical to SEQ ID NO: 5314
  Description of Artificial Sequence: Synthetic primer
  Description of Combined DNA/RNA Molecule: Synthetic primer

SEQ ID NO: 9845 - DNA, 39 bp, Artificial Sequence; identical to SEQ ID NO: 5315
  Description of Artificial Sequence: Synthetic primer
  Description of Combined DNA/RNA Molecule: Synthetic primer

SEQ ID NO: 9846 - DNA, 39 bp, Artificial Sequence; identical to SEQ ID NO: 5316
  Description of Artificial Sequence: Synthetic primer
  Description of Combined DNA/RNA Molecule: Synthetic primer

SEQ ID NO: 9847 - DNA, 50 bp, Artificial Sequence; identical to SEQ ID NO: 5317
  Description of Artificial Sequence: Synthetic primer
  Description of Combined DNA/RNA Molecule: Synthetic primer

SEQ ID NO: 9848 - DNA, 51 bp, Artificial Sequence; identical to SEQ ID NO: 5318
  Description of Artificial Sequence: Synthetic oligonucleotide
  Description of Combined DNA/RNA Molecule: Synthetic oligonucleotide

SEQ ID NO: 9849 - DNA, 51 bp, Artificial Sequence; identical to SEQ ID NO: 5319
  Description of Artificial Sequence: Synthetic oligonucleotide

SEQ ID NO: 9850 - DNA, 29 bp, Artificial Sequence
  Description of Artificial Sequence: Synthetic probe
ttcccagcaccatgtgcctcaaccataac

SEQ ID NO: 9851 - DNA, 19 bp, Artificial Sequence
  Description of Artificial Sequence: Synthetic primer
ttgcacgttgtcctgcacc

SEQ ID NO: 9852 - DNA, 20 bp, Artificial Sequence
  Description of Artificial Sequence: Synthetic primer
tgccgtcatgggaaactacc

SEQ ID NO: 9853 - DNA, 44 bp, Artificial Sequence; identical to SEQ ID NO: 5323
  Description of Artificial Sequence: Synthetic primer
  Description of Combined DNA/RNA Molecule: Synthetic primer

SEQ ID NO: 9854 - DNA, 45 bp, Artificial Sequence; identical to SEQ ID NO: 5351
  Description of Artificial Sequence: Synthetic primer
  Description of Combined DNA/RNA Molecule: Synthetic primer

SEQ ID NO: 9855 - DNA, 46 bp, Artificial Sequence; identical to SEQ ID NO: 5352
  Description of Artificial Sequence: Synthetic primer
  Description of Combined DNA/RNA Molecule: Synthetic primer

SEQ ID NO: 9856 - DNA, 53 bp, Artificial Sequence; identical to SEQ ID NO: 5353
  Description of Artificial Sequence: Synthetic primer
  Description of Combined DNA/RNA Molecule: Synthetic primer

SEQ ID NO: 9857 - DNA, 56 bp, Artificial Sequence; identical to SEQ ID NO: 5354
  Description of Artificial Sequence: Synthetic oligonucleotide
  Description of Combined DNA/RNA Molecule: Synthetic oligonucleotide

SEQ ID NO: 9858 - DNA, 44 bp, Artificial Sequence; identical to SEQ ID NO: 5355
  Description of Artificial Sequence: Synthetic oligonucleotide

SEQ ID NO: 9859 - DNA, 26 bp, Artificial Sequence
  Description of Artificial Sequence: Synthetic probe
ttaactccagcccacttctccaaggg

SEQ ID NO: 9860 - DNA, 21 bp, Artificial Sequence
  Description of Artificial Sequence: Synthetic primer
ttgcatttcgttagcgacaca

SEQ ID NO: 9861 - DNA, 20 bp, Artificial Sequence
  Description of Artificial Sequence: Synthetic primer
tgcgggtagatcgactcaca

SEQ ID NO: 9862 - DNA, 51 bp, Artificial Sequence; identical to SEQ ID NO: 5359
  Description of Artificial Sequence: Synthetic primer
  Description of Combined DNA/RNA Molecule: Synthetic primer

SEQ ID NO: 9863 - DNA, 39 bp, Artificial Sequence; identical to SEQ ID NO: 5369
  Description of Artificial Sequence: Synthetic primer
  Description of Combined DNA/RNA Molecule: Synthetic primer

SEQ ID NO: 9864 - DNA, 41 bp, Artificial Sequence; identical to SEQ ID NO: 5370
  Description of Artificial Sequence: Synthetic primer
  Description of Combined DNA/RNA Molecule: Synthetic primer

SEQ ID NO: 9865 - DNA, 52 bp, Artificial Sequence; identical to SEQ ID NO: 5371
  Description of Artificial Sequence: Synthetic primer
  Description of Combined DNA/RNA Molecule: Synthetic primer

SEQ ID NO: 9866 - DNA, 48 bp, Artificial Sequence; identical to SEQ ID NO: 5372
  Description of Artificial Sequence: Synthetic oligonucleotide
  Description of Combined DNA/RNA Molecule: Synthetic oligonucleotide

SEQ ID NO: 9867 - DNA, 50 bp, Artificial Sequence; identical to SEQ ID NO: 5373
  Description of Artificial Sequence: Synthetic oligonucleotide

SEQ ID NO: 9868 - DNA, 30 bp, Artificial Sequence; identical to SEQ ID NO: 5374
  Description of Artificial Sequence: Synthetic probe

SEQ ID NO: 9869 - DNA, 21 bp, Artificial Sequence
  Description of Artificial Sequence: Synthetic primer
taccactcatcttctgcgaca

SEQ ID NO: 9870 - DNA, 20 bp, Artificial Sequence
  Description of Artificial Sequence: Synthetic primer
tgcgggtagatcgactcaca

SEQ ID NO: 9871 - DNA, 46 bp, Artificial Sequence; identical to SEQ ID NO: 5377
  Description of Artificial Sequence: Synthetic primer
  Description of Combined DNA/RNA Molecule: Synthetic primer

SEQ ID NO: 9872 - DNA, 41 bp, Artificial Sequence; identical to SEQ ID NO: 5387
  Description of Artificial Sequence: Synthetic primer
  Description of Combined DNA/RNA Molecule: Synthetic primer

SEQ ID NO: 9873 - DNA, 42 bp, Artificial Sequence; identical to SEQ ID NO: 5388
  Description of Artificial Sequence: Synthetic primer
  Description of Combined DNA/RNA Molecule: Synthetic primer

SEQ ID NO: 9874 - DNA, 49 bp, Artificial Sequence; identical to SEQ ID NO: 5389
  Description of Artificial Sequence: Synthetic primer
  Description of Combined DNA/RNA Molecule: Synthetic primer

SEQ ID NO: 9875 - DNA, 46 bp, Artificial Sequence; identical to SEQ ID NO: 5390
  Description of Artificial Sequence: Synthetic oligonucleotide
  Description of Combined DNA/RNA Molecule: Synthetic oligonucleotide

SEQ ID NO: 9876 - DNA, 49 bp, Artificial Sequence; identical to SEQ ID NO: 5391
  Description of Artificial Sequence: Synthetic oligonucleotide

SEQ ID NO: 9877 - DNA, 29 bp, Artificial Sequence
  Description of Artificial Sequence: Synthetic probe
ttaggaacaacaggcaacattggtaggga

SEQ ID NO: 9878 - DNA, 21 bp, Artificial Sequence
  Description of Artificial Sequence: Synthetic primer
tggatcgagacggaatgcaac

SEQ ID NO: 9879 - DNA, 22 bp, Artificial Sequence
  Description of Artificial Sequence: Synthetic primer
tgcgggtatcaatcagggaaac

SEQ ID NO: 9880 - DNA, 50 bp, Artificial Sequence; identical to SEQ ID NO: 5395
  Description of Artificial Sequence: Synthetic primer
  Description of Combined DNA/RNA Molecule: Synthetic primer

SEQ ID NO: 9881 - DNA, 45 bp, Artificial Sequence; identical to SEQ ID NO: 5496
  Description of Artificial Sequence: Synthetic primer
  Description of Combined DNA/RNA Molecule: Synthetic primer

SEQ ID NO: 9882 - DNA, 46 bp, Artificial Sequence; identical to SEQ ID NO: 5497
  Description of Artificial Sequence: Synthetic primer
  Description of Combined DNA/RNA Molecule: Synthetic primer

SEQ ID NO: 9883 - DNA, 55 bp, Artificial Sequence; identical to SEQ ID NO: 5498
  Description of Artificial Sequence: Synthetic primer
  Description of Combined DNA/RNA Molecule: Synthetic primer

SEQ ID NO: 9884 - DNA, 54 bp, Artificial Sequence; identical to SEQ ID NO: 5499
  Description of Artificial Sequence: Synthetic oligonucleotide
  Description of Combined DNA/RNA Molecule: Synthetic oligonucleotide

SEQ ID NO: 9885 - DNA, 53 bp, Artificial Sequence; identical to SEQ ID NO: 5500
  Description of Artificial Sequence: Synthetic oligonucleotide

SEQ ID NO: 9886 - DNA, 29 bp, Artificial Sequence
  Description of Artificial Sequence: Synthetic probe
cctgggacaatggagagagtctcactctg

SEQ ID NO: 9887 - DNA, 22 bp, Artificial Sequence
  Description of Artificial Sequence: Synthetic primer
tcgatggtcaatgagcttcaca

SEQ ID NO: 9888 - DNA, 22 bp, Artificial Sequence
  Description of Artificial Sequence: Synthetic primer
tggagagggagatcacgtaaca

SEQ ID NO: 9889 - DNA, 51 bp, Artificial Sequence; identical to SEQ ID NO: 5504
  Description of Artificial Sequence: Synthetic primer
  Description of Combined DNA/RNA Molecule: Synthetic primer

SEQ ID NO: 9890 - DNA, 41 bp, Artificial Sequence; identical to SEQ ID NO: 5593
  Description of Artificial Sequence: Synthetic primer
  Description of Combined DNA/RNA Molecule: Synthetic primer

SEQ ID NO: 9891 - DNA, 38 bp, Artificial Sequence; identical to SEQ ID NO: 5594
  Description of Artificial Sequence: Synthetic primer
  Description of Combined DNA/RNA Molecule: Synthetic primer

SEQ ID NO: 9892 - DNA, 53 bp, Artificial Sequence; identical to SEQ ID NO: 5595
  Description of Artificial Sequence: Synthetic primer
  Description of Combined DNA/RNA Molecule: Synthetic primer

SEQ ID NO: 9893 - DNA, 46 bp, Artificial Sequence; identical to SEQ ID NO: 5596
  Description of Artificial Sequence: Synthetic oligonucleotide
  Description of Combined DNA/RNA Molecule: Synthetic oligonucleotide

SEQ ID NO: 9894 - DNA, 44 bp, Artificial Sequence; identical to SEQ ID NO: 5597
  Description of Artificial Sequence: Synthetic oligonucleotide

SEQ ID NO: 9895 - DNA, 23 bp, Artificial Sequence
  Description of Artificial Sequence: Synthetic probe
ttctccgcaccccagctccagtc

SEQ ID NO: 9896 - DNA, 22 bp, Artificial Sequence
  Description of Artificial Sequence: Synthetic primer
tccaaacgattaggagcgtcaa

SEQ ID NO: 9897 - DNA, 21 bp, Artificial Sequence
  Description of Artificial Sequence: Synthetic primer
tgggcgtatacctctgtccaa

SEQ ID NO: 9898 - DNA, 48 bp, Artificial Sequence; identical to SEQ ID NO: 5601
  Description of Artificial Sequence: Synthetic primer
  Description of Combined DNA/RNA Molecule: Synthetic primer

SEQ ID NO: 9899 - DNA, 42 bp, Artificial Sequence; identical to SEQ ID NO: 5638
  Description of Artificial Sequence: Synthetic primer
  Description of Combined DNA/RNA Molecule: Synthetic primer

SEQ ID NO: 9900 - DNA, 40 bp, Artificial Sequence; identical to SEQ ID NO: 5639
  Description of Artificial Sequence: Synthetic primer
  Description of Combined DNA/RNA Molecule: Synthetic primer

SEQ ID NO: 9901 - DNA, 53 bp, Artificial Sequence; identical to SEQ ID NO: 5640
  Description of Artificial Sequence: Synthetic primer
  Description of Combined DNA/RNA Molecule: Synthetic primer

SEQ ID NO: 9902 - DNA, 46 bp, Artificial Sequence; identical to SEQ ID NO: 5641
  Description of Artificial Sequence: Synthetic oligonucleotide
  Description of Combined DNA/RNA Molecule: Synthetic oligonucleotide

SEQ ID NO: 9903 - DNA, 45 bp, Artificial Sequence; identical to SEQ ID NO: 5642
  Description of Artificial Sequence: Synthetic oligonucleotide

SEQ ID NO: 9904 - DNA, 28 bp, Artificial Sequence
  Description of Artificial Sequence: Synthetic probe
aaacagacagccaccagctgaatgaagc

SEQ ID NO: 9905 - DNA, 21 bp, Artificial Sequence
  Description of Artificial Sequence: Synthetic primer
tcacgcacgtagggtctaaac

SEQ ID NO: 9906 - DNA, 20 bp, Artificial Sequence
  Description of Artificial Sequence: Synthetic primer
tgtaaccacagccggacaac

SEQ ID NO: 9907 - DNA, 47 bp, Artificial Sequence; identical to SEQ ID NO: 5646
  Description of Artificial Sequence: Synthetic primer
  Description of Combined DNA/RNA Molecule: Synthetic primer

SEQ ID NO: 9908 - DNA, 50 bp, Artificial Sequence; identical to SEQ ID NO: 5692
  Description of Artificial Sequence: Synthetic primer
  Description of Combined DNA/RNA Molecule: Synthetic primer

SEQ ID NO: 9909 - DNA, 44 bp, Artificial Sequence; identical to SEQ ID NO: 5693
  Description of Artificial Sequence: Synthetic primer
  Description of Combined DNA/RNA Molecule: Synthetic primer

SEQ ID NO: 9910 - DNA, 57 bp, Artificial Sequence; identical to SEQ ID NO: 5694
  Description of Artificial Sequence: Synthetic primer
  Description of Combined DNA/RNA Molecule: Synthetic primer

SEQ ID NO: 9911 - DNA, 49 bp, Artificial Sequence; identical to SEQ ID NO: 5695
  Description of Artificial Sequence: Synthetic oligonucleotide
  Description of Combined DNA/RNA Molecule: Synthetic oligonucleotide

SEQ ID NO: 9912 - DNA, 46 bp, Artificial Sequence; identical to SEQ ID NO: 5696
  Description of Artificial Sequence: Synthetic oligonucleotide

SEQ ID NO: 9913 - DNA, 24 bp, Artificial Sequence
  Description of Artificial Sequence: Synthetic probe
tttgtgacaaagccacagggcagc

SEQ ID NO: 9914 - DNA, 21 bp, Artificial Sequence
  Description of Artificial Sequence: Synthetic primer
taatctccagacctccgaacc

SEQ ID NO: 9915 - DNA, 22 bp, Artificial Sequence
  Description of Artificial Sequence: Synthetic primer
tgtcccgttcaatccttacacc

SEQ ID NO: 9916 - DNA, 52 bp, Artificial Sequence; identical to SEQ ID NO: 5700
  Description of Artificial Sequence: Synthetic primer
  Description of Combined DNA/RNA Molecule: Synthetic primer

SEQ ID NO: 9917 - DNA, 35 bp, Artificial Sequence; identical to SEQ ID NO: 5877
  Description of Artificial Sequence: Synthetic primer
  Description of Combined DNA/RNA Molecule: Synthetic primer

SEQ ID NO: 9918 - DNA, 44 bp, Artificial Sequence; identical to SEQ ID NO: 5878
  Description of Artificial Sequence: Synthetic primer
  Description of Combined DNA/RNA Molecule: Synthetic primer

SEQ ID NO: 9919 - DNA, 58 bp, Artificial Sequence; identical to SEQ ID NO: 5879
  Description of Artificial Sequence: Synthetic primer
  Description of Combined DNA/RNA Molecule: Synthetic primer

SEQ ID NO: 9920 - DNA, 42 bp, Artificial Sequence; identical to SEQ ID NO: 5880
  Description of Artificial Sequence: Synthetic oligonucleotide
  Description of Combined DNA/RNA Molecule: Synthetic oligonucleotide

SEQ ID NO: 9921 - DNA, 57 bp, Artificial Sequence; identical to SEQ ID NO: 5881
  Description of Artificial Sequence: Synthetic oligonucleotide

SEQ ID NO: 9922 - DNA, 36 bp, Artificial Sequence; identical to SEQ ID NO: 5882
  Description of Artificial Sequence: Synthetic probe

SEQ ID NO: 9923 - DNA, 19 bp, Artificial Sequence
  Description of Artificial Sequence: Synthetic primer
tttcgctcgacgcatacca

SEQ ID NO: 9924 - DNA, 19 bp, Artificial Sequence
  Description of Artificial Sequence: Synthetic primer
ttttacagtagccgcgcca

SEQ ID NO: 9925 - DNA, 49 bp, Artificial Sequence; identical to SEQ ID NO: 5885
  Description of Artificial Sequence: Synthetic primer
  Description of Combined DNA/RNA Molecule: Synthetic primer

SEQ ID NO: 9926 - DNA, 47 bp, Artificial Sequence; identical to SEQ ID NO: 6137
  Description of Artificial Sequence: Synthetic primer
  Description of Combined DNA/RNA Molecule: Synthetic primer

SEQ ID NO: 9927 - DNA, 47 bp, Artificial Sequence; identical to SEQ ID NO: 6138
  Description of Artificial Sequence: Synthetic primer
  Description of Combined DNA/RNA Molecule: Synthetic primer

SEQ ID NO: 9928 - DNA, 55 bp, Artificial Sequence; identical to SEQ ID NO: 6139
  Description of Artificial Sequence: Synthetic primer
  Description of Combined DNA/RNA Molecule: Synthetic primer

SEQ ID NO: 9929 - DNA, 52 bp, Artificial Sequence; identical to SEQ ID NO: 6140
  Description of Artificial Sequence: Synthetic oligonucleotide
  Description of Combined DNA/RNA Molecule: Synthetic oligonucleotide

SEQ ID NO: 9930 - DNA, 48 bp, Artificial Sequence; identical to SEQ ID NO: 6141
  Description of Artificial Sequence: Synthetic oligonucleotide

SEQ ID NO: 9931 - DNA, 32 bp, Artificial Sequence; identical to SEQ ID NO: 6142
  Description of Artificial Sequence: Synthetic probe

SEQ ID NO: 9932 - DNA, 21 bp, Artificial Sequence
  Description of Artificial Sequence: Synthetic primer
tccctcgtcatctcccttacc

SEQ ID NO: 9933 - DNA, 19 bp, Artificial Sequence
  Description of Artificial Sequence: Synthetic primer
tcgctccatcaccaagacc

SEQ ID NO: 9934 - DNA, 52 bp, Artificial Sequence; identical to SEQ ID NO: 6145
  Description of Artificial Sequence: Synthetic primer
  Description of Combined DNA/RNA Molecule: Synthetic primer

SEQ ID NO: 9935 - DNA, 36 bp, Artificial Sequence; identical to SEQ ID NO: 6729
  Description of Artificial Sequence: Synthetic primer
  Description of Combined DNA/RNA Molecule: Synthetic primer

SEQ ID NO: 9936 - DNA, 39 bp, Artificial Sequence; identical to SEQ ID NO: 6730
  Description of Artificial Sequence: Synthetic primer
  Description of Combined DNA/RNA Molecule: Synthetic primer

SEQ ID NO: 9937 - DNA, 58 bp, Artificial Sequence; identical to SEQ ID NO: 6731
  Description of Artificial Sequence: Synthetic primer
  Description of Combined DNA/RNA Molecule: Synthetic primer

SEQ ID NO: 9938 - DNA, 46 bp, Artificial Sequence; identical to SEQ ID NO: 6732
  Description of Artificial Sequence: Synthetic oligonucleotide
  Description of Combined DNA/RNA Molecule: Synthetic oligonucleotide

SEQ ID NO: 9939 - DNA, 43 bp, Artificial Sequence; identical to SEQ ID NO: 6733
  Description of Artificial Sequence: Synthetic oligonucleotide

SEQ ID NO: 9940 - DNA, 27 bp, Artificial Sequence
  Description of Artificial Sequence: Synthetic probe
ttcatcccagcctgggaaagcagaagg

SEQ ID NO: 9941 - DNA, 20 bp, Artificial Sequence
  Description of Artificial Sequence: Synthetic primer
tcgtagactcgctatcgcca

SEQ ID NO: 9942 - DNA, 19 bp, Artificial Sequence
  Description of Artificial Sequence: Synthetic primer
tgctcatccctgctcacca

SEQ ID NO: 9943 - DNA, 43 bp, Artificial Sequence; identical to SEQ ID NO: 6737
  Description of Artificial Sequence: Synthetic primer
  Description of Combined DNA/RNA Molecule: Synthetic primer

SEQ ID NO: 9944 - DNA, 43 bp, Artificial Sequence; identical to SEQ ID NO: 6828
  Description of Artificial Sequence: Synthetic primer
  Description of Combined DNA/RNA Molecule: Synthetic primer

SEQ ID NO: 9945 - DNA, 45 bp, Artificial Sequence; identical to SEQ ID NO: 6829
  Description of Artificial Sequence: Synthetic primer
  Description of Combined DNA/RNA Molecule: Synthetic primer

SEQ ID NO: 9946 - DNA, 54 bp, Artificial Sequence; identical to SEQ ID NO: 6830
  Description of Artificial Sequence: Synthetic primer
  Description of Combined DNA/RNA Molecule: Synthetic primer

SEQ ID NO: 9947 - DNA, 45 bp, Artificial Sequence; identical to SEQ ID NO: 6831
  Description of Artificial Sequence: Synthetic oligonucleotide
  Description of Combined DNA/RNA Molecule: Synthetic oligonucleotide

SEQ ID NO: 9948 - DNA, 42 bp, Artificial Sequence; identical to SEQ ID NO: 6832
  Description of Artificial Sequence: Synthetic oligonucleotide

SEQ ID NO: 9949 - DNA, 22 bp, Artificial Sequence
  Description of Artificial Sequence: Synthetic probe
aaggcaacagccagcaccagcc

SEQ ID NO: 9950 - DNA, 19 bp, Artificial Sequence
  Description of Artificial Sequence: Synthetic primer
tctcgattacgctccgcac

SEQ ID NO: 9951 - DNA, 22 bp, Artificial Sequence
  Description of Artificial Sequence: Synthetic primer
tggccatgtctaagctacacac

SEQ ID NO: 9952 - DNA, 49 bp, Artificial Sequence; identical to SEQ ID NO: 6836
  Description of Artificial Sequence: Synthetic primer
  Description of Combined DNA/RNA Molecule: Synthetic primer

SEQ ID NO: 9953 - DNA, 53 bp, Artificial Sequence; identical to SEQ ID NO: 8950
  Description of Artificial Sequence: Synthetic primer
  Description of Combined DNA/RNA Molecule: Synthetic primer

SEQ ID NO: 9954 - DNA, 53 bp, Artificial Sequence; identical to SEQ ID NO: 8951
  Description of Artificial Sequence: Synthetic primer
  Description of Combined DNA/RNA Molecule: Synthetic primer

SEQ ID NO: 9955 - DNA, 57 bp, Artificial Sequence; identical to SEQ ID NO: 8952
  Description of Artificial Sequence: Synthetic primer
  Description of Combined DNA/RNA Molecule: Synthetic primer

SEQ ID NO: 9956 - DNA, 47 bp, Artificial Sequence; identical to SEQ ID NO: 8953
  Description of Artificial Sequence: Synthetic oligonucleotide
  Description of Combined DNA/RNA Molecule: Synthetic oligonucleotide

SEQ ID NO: 9957 - DNA, 43 bp, Artificial Sequence; identical to SEQ ID NO: 8954
  Description of Artificial Sequence: Synthetic oligonucleotide

SEQ ID NO: 9958 - DNA, 23 bp, Artificial Sequence
  Description of Artificial Sequence: Synthetic probe
ttctccccacccaacacacaggc

SEQ ID NO: 9959 - DNA, 20 bp, Artificial Sequence
  Description of Artificial Sequence: Synthetic primer
tttcaggccctaaccaccac

SEQ ID NO: 9960 - DNA, 20 bp, Artificial Sequence
  Description of Artificial Sequence: Synthetic primer
tccatcgcccttaatcccac

SEQ ID NO: 9961 - DNA, 52 bp, Artificial Sequence; identical to SEQ ID NO: 8958
  Description of Artificial Sequence: Synthetic primer
  Description of Combined DNA/RNA Molecule: Synthetic primer

SEQ ID NO: 9962 - DNA, 45 bp, Artificial Sequence; identical to SEQ ID NO: 8968
  Description of Artificial Sequence: Synthetic primer
  Description of Combined DNA/RNA Molecule: Synthetic primer

SEQ ID NO: 9963 - DNA, 45 bp, Artificial Sequence; identical to SEQ ID NO: 8969
  Description of Artificial Sequence: Synthetic primer
  Description of Combined DNA/RNA Molecule: Synthetic primer

SEQ ID NO: 9964 - DNA, 49 bp, Artificial Sequence; identical to SEQ ID NO: 8970
  Description of Artificial Sequence: Synthetic primer
  Description of Combined DNA/RNA Molecule: Synthetic primer

SEQ ID NO: 9965 - DNA, 48 bp, Artificial Sequence; identical to SEQ ID NO: 8971
  Description of Artificial Sequence: Synthetic oligonucleotide
  Description of Combined DNA/RNA Molecule: Synthetic oligonucleotide

SEQ ID NO: 9966 - DNA, 49 bp, Artificial Sequence; identical to SEQ ID NO: 8972
  Description of Artificial Sequence: Synthetic oligonucleotide

SEQ ID NO: 9967 - DNA, 31 bp, Artificial Sequence; identical to SEQ ID NO: 8973
  Description of Artificial Sequence: Synthetic probe

SEQ ID NO: 9968 - DNA, 20 bp, Artificial Sequence
  Description of Artificial Sequence: Synthetic primer
tcgctcttcagcctcctaca

SEQ ID NO: 9969 - DNA, 22 bp, Artificial Sequence
  Description of Artificial Sequence: Synthetic primer
tccggcaataattcccagaaca

SEQ ID NO: 9970 - DNA, 45 bp, Artificial Sequence; identical to SEQ ID NO: 8976
  Description of Artificial Sequence: Synthetic primer
  Description of Combined DNA/RNA Molecule: Synthetic primer

SEQ ID NO: 9971 - DNA, 39 bp, Artificial Sequence; identical to SEQ ID NO: 9297
  Description of Artificial Sequence: Synthetic primer
  Description of Combined DNA/RNA Molecule: Synthetic primer

SEQ ID NO: 9972 - DNA, 40 bp, Artificial Sequence; identical to SEQ ID NO: 9298
  Description of Artificial Sequence: Synthetic primer
  Description of Combined DNA/RNA Molecule: Synthetic primer

SEQ ID NO: 9973 - DNA, 50 bp, Artificial Sequence; identical to SEQ ID NO: 9299
  Description of Artificial Sequence: Synthetic primer
  Description of Combined DNA/RNA Molecule: Synthetic primer

SEQ ID NO: 9974 - DNA, 52 bp, Artificial Sequence; identical to SEQ ID NO: 9300
  Description of Artificial Sequence: Synthetic oligonucleotide
  Description of Combined DNA/RNA Molecule: Synthetic oligonucleotide

SEQ ID NO: 9975 - DNA, 44 bp, Artificial Sequence; identical to SEQ ID NO: 9301
  Description of Artificial Sequence: Synthetic oligonucleotide

SEQ ID NO: 9976 - DNA, 22 bp, Artificial Sequence
  Description of Artificial Sequence: Synthetic probe
ttggctgcactgctccatcccc

SEQ ID NO: 9977 - DNA, 22 bp, Artificial Sequence
  Description of Artificial Sequence: Synthetic primer
tacgaatcacccgagagttcaa

SEQ ID NO: 9978 - DNA, 22 bp, Artificial Sequence
  Description of Artificial Sequence: Synthetic primer
tctgacctatacccacccacaa

SEQ ID NO: 9979 - DNA, 47 bp, Artificial Sequence; identical to SEQ ID NO: 9305
  Description of Artificial Sequence: Synthetic primer
  Description of Combined DNA/RNA Molecule: Synthetic primer

SEQ ID NO: 9980 - DNA, 39 bp, Artificial Sequence
  Description of Artificial Sequence: Synthetic primer
  Description of Combined DNA/RNA Molecule: Synthetic primer
acgacgacgacgaagcacaaaggaggctgaggcaaagac

SEQ ID NO: 9981 - DNA, 40 bp, Artificial Sequence
  Description of Artificial Sequence: Synthetic primer
  Description of Combined DNA/RNA Molecule: Synthetic primer
acgacgacgacgaacacaaaggaggctgaggcaaagatgg

SEQ ID NO: 9982 - DNA, 53 bp, Artificial Sequence
  Description of Artificial Sequence: Synthetic primer
  Description of Combined DNA/RNA Molecule: Synthetic primer
acgacgacgacttgacgaacataatctctcccctgtcccttgttgggagtcat

SEQ ID NO: 9983 - DNA, 48 bp, Artificial Sequence
  Description of Artificial Sequence: Synthetic oligonucleotide
  Description of Combined DNA/RNA Molecule: Synthetic oligonucleotide
taggaacacggaggacatcaagggttgggttgagagcactacacagtt

SEQ ID NO: 9984 - DNA, 54 bp, Artificial Sequence
  Description of Artificial Sequence: Synthetic oligonucleotide
cagccaggctgagaagagaagctgacaagtgattgtgggtgggtataggtcaga

SEQ ID NO: 9985 - DNA, 31 bp, Artificial Sequence
  Description of Artificial Sequence: Synthetic probe
ttcactacacagccaggctgagaagagaagc

SEQ ID NO: 9986 - DNA, 21 bp, Artificial Sequence
  Description of Artificial Sequence: Synthetic primer
taggaacacggaggacatcaa

SEQ ID NO: 9987 - DNA, 22 bp, Artificial Sequence
  Description of Artificial Sequence: Synthetic primer
tctgacctatacccacccacaa

SEQ ID NO: 9988 - DNA, 51 bp, Artificial Sequence
  Description of Artificial Sequence: Synthetic primer
  Description of Combined DNA/RNA Molecule: Synthetic primer
tctgacctatacccacccacaacctgtcccttgttgggagtcacctgtcaa

SEQ ID NO: 9989 - DNA, 44 bp, Artificial Sequence
  Description of Artificial Sequence: Synthetic primer
  Description of Combined DNA/RNA Molecule: Synthetic primer
acgacgacgacgaataacctacacagagcacaccaagcauaagg

SEQ ID NO: 9990 - DNA, 46 bp, Artificial Sequence
  Description of Artificial Sequence: Synthetic primer
  Description of Combined DNA/RNA Molecule: Synthetic primer
acgacgacgacgaaaacctacacagagcacaccaagcataagacaa

SEQ ID NO: 9991 - DNA, 58 bp, Artificial Sequence
  Description of Artificial Sequence: Synthetic primer
  Description of Combined DNA/RNA Molecule: Synthetic primer
acgacgacgacttgacgaacataatgctgttaaataaaaagctgaggtgaggcucagt

SEQ ID NO: 9992 - DNA, 54 bp, Artificial Sequence
  Description of Artificial Sequence: Synthetic oligonucleotide
  Description of Combined DNA/RNA Molecule: Synthetic oligonucleotide
ttgattgggatcgttcgcaccagtcactgcaatggatgttgtctacgcactcgg

SEQ ID NO: 9993 - DNA, 53 bp, Artificial Sequence
  Description of Artificial Sequence: Synthetic oligonucleotide
ctcaagcaccagggacacactctgtacagctttgtggctcaataacgggcaga

SEQ ID NO: 9994 - DNA, 27 bp, Artificial Sequence
  Description of Artificial Sequence: Synthetic probe
aactatgcactcaagcaccagggacac

SEQ ID NO: 9995 - DNA, 20 bp, Artificial Sequence
  Description of Artificial Sequence: Synthetic primer
ttgattgggatcgttcgcac

SEQ ID NO: 9996 - DNA, 20 bp, Artificial Sequence
  Description of Artificial Sequence: Synthetic primer
tctgcccgttattgagccac

SEQ ID NO: 9997 - DNA, 46 bp, Artificial Sequence
  Description of Artificial Sequence: Synthetic primer
  Description of Combined DNA/RNA Molecule: Synthetic primer
tctgcccgttattgagccactgaggctcagccaccaaagttgtacg

SEQ ID NO: 9998 - DNA, 35 bp, Artificial Sequence
  Description of Artificial Sequence: Synthetic primer
  Description of Combined DNA/RNA Molecule: Synthetic primer
acgacgacgacgaagcccctgcagcctgcaaggct

SEQ ID NO: 9999 - DNA, 36 bp, Artificial Sequence
  Description of Artificial Sequence: Synthetic primer
  Description of Combined DNA/RNA Molecule: Synthetic primer
acgacgacgacgaaccatggcccctgcagccugcag

SEQ ID NO: 10000 - DNA, 61 bp, Artificial Sequence
  Description of Artificial Sequence: Synthetic primer
  Description of Combined DNA/RNA Molecule: Synthetic primer
acgacgacgacttgacgaacataatggttttccaggatatgatagagcttgtggtagttgt

SEQ ID NO: 10001 - DNA, 54 bp, Artificial Sequence
  Description of Artificial Sequence: Synthetic oligonucleotide
  Description of Combined DNA/RNA Molecule: Synthetic oligonucleotide
tatggactgtaccagcccaacctcaacaagaatgagtcagtgctacgcacacgg

SEQ ID NO: 10002 - DNA, 50 bp, Artificial Sequence
  Description of Artificial Sequence: Synthetic oligonucleotide
cacaagccatcatggcctttcacagtggcttgaaactgaggcggtgttca

SEQ ID NO: 10003 - DNA, 30 bp, Artificial Sequence
  Description of Artificial Sequence: Synthetic probe
aactacgcacacaagccatcatggcctttc

SEQ ID NO: 10004 - DNA, 20 bp, Artificial Sequence
  Description of Artificial Sequence: Synthetic primer
tatggactgtaccagcccaa

SEQ ID NO: 10005 - DNA, 21 bp, Artificial Sequence
  Description of Artificial Sequence: Synthetic primer
tgaacaccgcctcagtttcaa

SEQ ID NO: 10006 - DNA, 57 bp, Artificial Sequence
  Description of Artificial Sequence: Synthetic primer
  Description of Combined DNA/RNA Molecule: Synthetic primer
tgaacaccgcctcagtttcaaggatatgatagagcttgtggtagttgccattgtgag

SEQ ID NO: 10007 - DNA, 41 bp, Artificial Sequence
  Description of Artificial Sequence: Synthetic primer
  Description of Combined DNA/RNA Molecule: Synthetic primer
acgacgacgacgaagaccacactgaacccagtcccacagcg

SEQ ID NO: 10008 - DNA, 42 bp, Artificial Sequence
  Description of Artificial Sequence: Synthetic primer
  Description of Combined DNA/RNA Molecule: Synthetic primer
acgacgacgacgaacacactgaacccagtcccacagcaagct

SEQ ID NO: 10009 - DNA, 50 bp, Artificial Sequence
  Description of Artificial Sequence: Synthetic primer
  Description of Combined DNA/RNA Molecule: Synthetic primer
acgacgacgacttgacgaacataatgggctgaggtttggtgtggagacac

SEQ ID NO: 10010 - DNA, 46 bp, Artificial Sequence
  Description of Artificial Sequence: Synthetic oligonucleotide
  Description of Combined DNA/RNA Molecule: Synthetic oligonucleotide
tttgcctcttgtaggtgccatgccaccttttcctgggcgcacctat

SEQ ID NO: 10011 - DNA, 43 bp, Artificial Sequence
  Description of Artificial Sequence: Synthetic oligonucleotide
cctgcagtggtgacagcccactgctgggcaacgcggatattca

SEQ ID NO: 10012 - DNA, 21 bp, Artificial Sequence
  Description of Artificial Sequence: Synthetic probe
aagggcgcacctgcagtggtg

SEQ ID NO: 10013 - DNA, 20 bp, Artificial Sequence
  Description of Artificial Sequence: Synthetic primer
tttgcctcttgtaggtgcca

SEQ ID NO: 10014 - DNA, 19 bp, Artificial Sequence
  Description of Artificial Sequence: Synthetic primer
tgaatatccgcgttgccca

SEQ ID NO: 10015 - DNA, 47 bp, Artificial Sequence
  Description of Artificial Sequence: Synthetic primer
  Description of Combined DNA/RNA Molecule: Synthetic primer
tgaatatccgcgttgcccatgtggagacatgagcagtgggttgtcat

SEQ ID NO: 10016 - DNA, 49 bp, Artificial Sequence
  Description of Artificial Sequence: Synthetic primer
  Description of Combined DNA/RNA Molecule: Synthetic primer
acgacgacgacgaatgccccctcctttataaagatatacctccagggaa

SEQ ID NO: 10017 - DNA, 43 bp, Artificial Sequence
  Description of Artificial Sequence: Synthetic primer
  Description of Combined DNA/RNA Molecule: Synthetic primer
acgacgacgacgaacaaacagcagcatcaacctctggcagcta

SEQ ID NO: 10018 - DNA, 49 bp, Artificial Sequence
  Description of Artificial Sequence: Synthetic primer
  Description of Combined DNA/RNA Molecule: Synthetic primer
acgacgacgacttgacgaacataatggtggaggaggtgactggccccta

SEQ ID NO: 10019 - DNA, 46 bp, Artificial Sequence
  Description of Artificial Sequence: Synthetic oligonucleotide
  Description of Combined DNA/RNA Molecule: Synthetic oligonucleotide
tgtcgcccggtagcaataaacggaggctccaccctgtcccacctgt

SEQ ID NO: 10020 - DNA, 51 bp, Artificial Sequence
  Description of Artificial Sequence: Synthetic oligonucleotide
cctacctcactagcacccacactccaggggtttccgcgatctttgcattca

SEQ ID NO: 10021 - DNA, 27 bp, Artificial Sequence
  Description of Artificial Sequence: Synthetic probe
tttgtcccacctacctcactagcaccc

SEQ ID NO: 10022 - DNA, 21 bp, Artificial Sequence
  Description of Artificial Sequence: Synthetic primer
tgtcgcccggtagcaataaac

SEQ ID NO: 10023 - DNA, 22 bp, Artificial Sequence
  Description of Artificial Sequence: Synthetic primer
tgaatgcaaagatcgcggaaac

SEQ ID NO: 10024 - DNA, 46 bp, Artificial Sequence
  Description of Artificial Sequence: Synthetic primer
  Description of Combined DNA/RNA Molecule: Synthetic primer
tgaatgcaaagatcgcggaaacggtgactggcccctggaatgtgga

SEQ ID NO: 10025 - DNA, 45 bp, Artificial Sequence
  Description of Artificial Sequence: Synthetic primer
  Description of Combined DNA/RNA Molecule: Synthetic primer
acgacgacgacgaaccacactggtgtcccagaatagatcaugttt

SEQ ID NO: 10026 - DNA, 49 bp, Artificial Sequence
  Description of Artificial Sequence: Synthetic primer
  Description of Combined DNA/RNA Molecule: Synthetic primer
acgacgacgacgaacacactggtgtcccagaatagatcatgttccccaa

SEQ ID NO: 10027 - DNA, 52 bp, Artificial Sequence
  Description of Artificial Sequence: Synthetic primer
  Description of Combined DNA/RNA Molecule: Synthetic primer
acgacgacgacttgacgaacataatctttggcctcttggactgaggcugtga

SEQ ID NO: 10028 - DNA, 53 bp, Artificial Sequence
  Description of Artificial Sequence: Synthetic oligonucleotide
  Description of Combined DNA/RNA Molecule: Synthetic oligonucleotide
tgtgcactagtccacgtgaaacttgtcaggttcccacaattcagcgcaggcgg

SEQ ID NO: 10029 - DNA, 46 bp, Artificial Sequence
  Description of Artificial Sequence: Synthetic oligonucleotide
ggcaaggcagccaaagagagggcagtttccgcgatctttgcattca

SEQ ID NO: 10030 - DNA, 25 bp, Artificial Sequence
  Description of Artificial Sequence: Synthetic probe
aacagcgcaggcaaggcagccaaag

SEQ ID NO: 10031 - DNA, 22 bp, Artificial Sequence
  Description of Artificial Sequence: Synthetic primer
tgtgcactagtccacgtgaaac

SEQ ID NO: 10032 - DNA, 22 bp, Artificial Sequence
  Description of Artificial Sequence: Synthetic primer
tgaatgcaaagatcgcggaaac

SEQ ID NO: 10033 - DNA, 47 bp, Artificial Sequence
  Description of Artificial Sequence: Synthetic primer
  Description of Combined DNA/RNA Molecule: Synthetic primer
tgaatgcaaagatcgcggaaacggctgtggcagccaatgaatgcccc

SEQ ID NO: 10034 - DNA, 39 bp, Artificial Sequence
  Description of Artificial Sequence: Synthetic primer
  Description of Combined DNA/RNA Molecule: Synthetic primer
acgacgacgacgaacaccaggagctgtgggcacaugaga

SEQ ID NO: 10035 - DNA, 39 bp, Artificial Sequence
  Description of Artificial Sequence: Synthetic primer
  Description of Combined DNA/RNA Molecule: Synthetic primer
acgacgacgacgaagctgcacaagcaccaggagcugtga

SEQ ID NO: 10036 - DNA, 51 bp, Artificial Sequence
  Description of Artificial Sequence: Synthetic primer
  Description of Combined DNA/RNA Molecule: Synthetic primer
acgacgacgacttgacgaacataatctctgcccacctccactggtcugctt

SEQ ID NO: 10037 - DNA, 45 bp, Artificial Sequence
  Description of Artificial Sequence: Synthetic oligonucleotide
  Description of Combined DNA/RNA Molecule: Synthetic oligonucleotide
ttggcgcaacggtttccaaggcaagcaggtcctaggtacauaggt

SEQ ID NO: 10038 - DNA, 46 bp, Artificial Sequence
  Description of Artificial Sequence: Synthetic oligonucleotide
tagacccatgggtgggaggcagagttgtttacatcctcctgcgtca

SEQ ID NO: 10039 - DNA, 27 bp, Artificial Sequence
  Description of Artificial Sequence: Synthetic probe
aaaggtacatagacccatgggtgggag

SEQ ID NO: 10040 - DNA, 19 bp, Artificial Sequence
  Description of Artificial Sequence: Synthetic primer
ttggcgcaacggtttccaa

SEQ ID NO: 10041 - DNA, 22 bp, Artificial Sequence
  Description of Artificial Sequence: Synthetic primer
tgacgcaggaggatgtaaacaa

SEQ ID NO: 10042 - DNA, 48 bp, Artificial Sequence
  Description of Artificial Sequence: Synthetic primer
  Description of Combined DNA/RNA Molecule: Synthetic primer
tgacgcaggaggatgtaaacaaccacctccactggtctgctctgccct

SEQ ID NO: 10043 - DNA, 43 bp, Artificial Sequence; identical to SEQ ID NO: 933
  Description of Artificial Sequence: Synthetic primer
  Description of Combined DNA/RNA Molecule: Synthetic primer

SEQ ID NO: 10044 - DNA, 46 bp, Artificial Sequence; identical to SEQ ID NO: 934
  Description of Artificial Sequence: Synthetic primer
  Description of Combined DNA/RNA Molecule: Synthetic primer

SEQ ID NO: 10045 - DNA, 56 bp, Artificial Sequence; identical to SEQ ID NO: 935
  Description of Artificial Sequence: Synthetic primer
  Description of Combined DNA/RNA Molecule: Synthetic primer

SEQ ID NO: 10046 - DNA, 45 bp, Artificial Sequence; identical to SEQ ID NO: 936
  Description of Artificial Sequence: Synthetic oligonucleotide
  Description of Combined DNA/RNA Molecule: Synthetic oligonucleotide

SEQ ID NO: 10047 - DNA, 47 bp, Artificial Sequence; identical to SEQ ID NO: 937
  Description of Artificial Sequence: Synthetic oligonucleotide

SEQ ID NO: 10048 - DNA, 24 bp, Artificial Sequence
  Description of Artificial Sequence: Synthetic probe
ttgccaacaggcctgtgatcccag

SEQ ID NO: 10049 - DNA, 21 bp, Artificial Sequence
  Description of Artificial Sequence: Synthetic primer
ttctagataccacggacgcac

SEQ ID NO: 10050 - DNA, 20 bp, Artificial Sequence
  Description of Artificial Sequence: Synthetic primer
tcagctttgcacaccaacac

SEQ ID NO: 10051 - DNA, 46 bp, Artificial Sequence; identical to SEQ ID NO: 941
  Description of Artificial Sequence: Synthetic primer
  Description of Combined DNA/RNA Molecule: Synthetic primer

SEQ ID NO: 10052 - DNA, 42 bp, Artificial Sequence; identical to SEQ ID NO: 1313
  Description of Artificial Sequence: Synthetic primer
  Description of Combined DNA/RNA Molecule: Synthetic primer

SEQ ID NO: 10053 - DNA, 41 bp, Artificial Sequence; identical to SEQ ID NO: 1314
  Description of Artificial Sequence: Synthetic primer
  Description of Combined DNA/RNA Molecule: Synthetic primer

SEQ ID NO: 10054 - DNA, 47 bp, Artificial Sequence; identical to SEQ ID NO: 1315
  Description of Artificial Sequence: Synthetic primer
  Description of Combined DNA/RNA Molecule: Synthetic primer

SEQ ID NO: 10055 - DNA, 45 bp, Artificial Sequence; identical to SEQ ID NO: 1316
  Description of Artificial Sequence: Synthetic oligonucleotide
  Description of Combined DNA/RNA Molecule: Synthetic oligonucleotide

SEQ ID NO: 10056 - DNA, 43 bp, Artificial Sequence; identical to SEQ ID NO: 1317
  Description of Artificial Sequence: Synthetic oligonucleotide

SEQ ID NO: 10057 - DNA, 27 bp, Artificial Sequence
  Description of Artificial Sequence: Synthetic probe
ttagagtcagcacccaccaagtcaggt

SEQ ID NO: 10058 - DNA, 19 bp, Artificial Sequence
  Description of Artificial Sequence: Synthetic primer
tgcttacccacgatgcacc

SEQ ID NO: 10059 - DNA, 20 bp, Artificial Sequence
  Description of Artificial Sequence: Synthetic primer
tgcgagcaagtcatacgacc

SEQ ID NO: 10060 - DNA, 41 bp, Artificial Sequence; identical to SEQ ID NO: 1321
  Description of Artificial Sequence: Synthetic primer
  Description of Combined DNA/RNA Molecule: Synthetic primer

SEQ ID NO: 10061 - DNA, 45 bp, Artificial Sequence; identical to SEQ ID NO: 1384
  Description of Artificial Sequence: Synthetic primer
  Description of Combined DNA/RNA Molecule: Synthetic primer

SEQ ID NO: 10062 - DNA, 54 bp, Artificial Sequence; identical to SEQ ID NO: 1385
  Description of Artificial Sequence: Synthetic primer
  Description of Combined DNA/RNA Molecule: Synthetic primer

SEQ ID NO: 10063 - DNA, 53 bp, Artificial Sequence; identical to SEQ ID NO: 1386
  Description of Artificial Sequence: Synthetic oligonucleotide
  Description of Combined DNA/RNA Molecule: Synthetic oligonucleotide

SEQ ID NO: 10064 - DNA, 59 bp, Artificial Sequence; identical to SEQ ID NO: 1387
  Description of Artificial Sequence: Synthetic oligonucleotide

SEQ ID NO: 10065 - DNA, 37 bp, Artificial Sequence; identical to SEQ ID NO: 1388
  Description of Artificial Sequence: Synthetic probe

SEQ ID NO: 10066 - DNA, 22 bp, Artificial Sequence
  Description of Artificial Sequence: Synthetic primer
tctcatgggcgctagtatcaac

SEQ ID NO: 10067 - DNA, 22 bp, Artificial Sequence
  Description of Artificial Sequence: Synthetic primer
tgcgggtatcaatcagggaaac

SEQ ID NO: 10068 - DNA, 46 bp, Artificial Sequence; identical to SEQ ID NO: 1391
  Description of Artificial Sequence: Synthetic primer
  Description of Combined DNA/RNA Molecule: Synthetic primer

SEQ ID NO: 10069 - DNA, 40 bp, Artificial Sequence; identical to SEQ ID NO: 1826
  Description of Artificial Sequence: Synthetic primer
  Description of Combined DNA/RNA Molecule: Synthetic primer

SEQ ID NO: 10070 - DNA, 39 bp, Artificial Sequence; identical to SEQ ID NO: 1827
  Description of Artificial Sequence: Synthetic primer
  Description of Combined DNA/RNA Molecule: Synthetic primer

SEQ ID NO: 10071 - DNA, 52 bp, Artificial Sequence; identical to SEQ ID NO: 1828
  Description of Artificial Sequence: Synthetic primer
  Description of Combined DNA/RNA Molecule: Synthetic primer

SEQ ID NO: 10072 - DNA, 42 bp, Artificial Sequence; identical to SEQ ID NO: 1829
  Description of Artificial Sequence: Synthetic oligonucleotide
  Description of Combined DNA/RNA Molecule: Synthetic oligonucleotide

SEQ ID NO: 10073 - DNA, 43 bp, Artificial Sequence; identical to SEQ ID NO: 1830
  Description of Artificial Sequence: Synthetic oligonucleotide

SEQ ID NO: 10074 - DNA, 23 bp, Artificial Sequence
  Description of Artificial Sequence: Synthetic probe
aaggtgtcaggcagggctgcact

SEQ ID NO: 10075 - DNA, 19 bp, Artificial Sequence
  Description of Artificial Sequence: Synthetic primer
ttcgctgcccggttaaaca

SEQ ID NO: 10076 - DNA, 22 bp, Artificial Sequence
  Description of Artificial Sequence: Synthetic primer
tgtcgagctaggtccgataaca

SEQ ID NO: 10077 - DNA, 45 bp, Artificial Sequence; identical to SEQ ID NO: 1834
  Description of Artificial Sequence: Synthetic primer
  Description of Combined DNA/RNA Molecule: Synthetic primer

SEQ ID NO: 10078 - DNA, 38 bp, Artificial Sequence; identical to SEQ ID NO: 1925
  Description of Artificial Sequence: Synthetic primer
  Description of Combined DNA/RNA Molecule: Synthetic primer

SEQ ID NO: 10079 - DNA, 38 bp, Artificial Sequence; identical to SEQ ID NO: 1926
  Description of Artificial Sequence: Synthetic primer
  Description of Combined DNA/RNA Molecule: Synthetic primer

SEQ ID NO: 10080 - DNA, 49 bp, Artificial Sequence; identical to SEQ ID NO: 1927
  Description of Artificial Sequence: Synthetic primer
  Description of Combined DNA/RNA Molecule: Synthetic primer

SEQ ID NO: 10081 - DNA, 44 bp, Artificial Sequence; identical to SEQ ID NO: 1928
  Description of Artificial Sequence: Synthetic oligonucleotide
  Description of Combined DNA/RNA Molecule: Synthetic oligonucleotide

SEQ ID NO: 10082 - DNA, 41 bp, Artificial Sequence; identical to SEQ ID NO: 1929
  Description of Artificial Sequence: Synthetic oligonucleotide

SEQ ID NO: 10083 - DNA, 22 bp, Artificial Sequence
  Description of Artificial Sequence: Synthetic probe
ttagcctcagggctggctaggg

SEQ ID NO: 10084 - DNA, 22 bp, Artificial Sequence
  Description of Artificial Sequence: Synthetic primer
tatggtaaaatgtcagcggcac

SEQ ID NO: 10085 - DNA, 21 bp, Artificial Sequence
  Description of Artificial Sequence: Synthetic primer
ttagcaacaacggagcatcac

SEQ ID NO: 10086 - DNA, 49 bp, Artificial Sequence; identical to SEQ ID NO: 1933
  Description of Artificial Sequence: Synthetic primer
  Description of Combined DNA/RNA Molecule: Synthetic primer

SEQ ID NO: 10087 - DNA, 39 bp, Artificial Sequence; identical to SEQ ID NO: 1952
  Description of Artificial Sequence: Synthetic primer
  Description of Combined DNA/RNA Molecule: Synthetic primer

SEQ ID NO: 10088 - DNA, 65 bp, Artificial Sequence; identical to SEQ ID NO: 1953
  Description of Artificial Sequence: Synthetic primer
  Description of Combined DNA/RNA Molecule: Synthetic primer

SEQ ID NO: 10089 - DNA, 51 bp, Artificial Sequence; identical to SEQ ID NO: 1954
  Description of Artificial Sequence: Synthetic oligonucleotide
  Description of Combined DNA/RNA Molecule: Synthetic oligonucleotide

SEQ ID NO: 10090 - DNA, 52 bp, Artificial Sequence; identical to SEQ ID NO: 1955
  Description of Artificial Sequence: Synthetic oligonucleotide

SEQ ID NO: 10091 - DNA, 36 bp, Artificial Sequence; identical to SEQ ID NO: 1956
  Description of Artificial Sequence: Synthetic probe

SEQ ID NO: 10092 - DNA, 19 bp, Artificial Sequence
  Description of Artificial Sequence: Synthetic primer
ttgagaccgctgaccgaca

SEQ ID NO: 10093 - DNA, 19 bp, Artificial Sequence
  Description of Artificial Sequence: Synthetic primer
ttagctcgaccgtgcaaca

SEQ ID NO: 10094 - DNA, 51 bp, Artificial Sequence; identical to SEQ ID NO: 1959
  Description of Artificial Sequence: Synthetic primer
  Description of Combined DNA/RNA Molecule: Synthetic primer

SEQ ID NO: 10095 - DNA, 41 bp, Artificial Sequence; identical to SEQ ID NO: 3974
  Description of Artificial Sequence: Synthetic primer
  Description of Combined DNA/RNA Molecule: Synthetic primer

SEQ ID NO: 10096 - DNA, 42 bp, Artificial Sequence; identical to SEQ ID NO: 3975
  Description of Artificial Sequence: Synthetic primer
  Description of Combined DNA/RNA Molecule: Synthetic primer

SEQ ID NO: 10097 - DNA, 52 bp, Artificial Sequence; identical to SEQ ID NO: 3976
  Description of Artificial Sequence: Synthetic primer
  Description of Combined DNA/RNA Molecule: Synthetic primer

SEQ ID NO: 10098 - DNA, 45 bp, Artificial Sequence; identical to SEQ ID NO: 3977
  Description of Artificial Sequence: Synthetic oligonucleotide
  Description of Combined DNA/RNA Molecule: Synthetic oligonucleotide

SEQ ID NO: 10099 - DNA, 47 bp, Artificial Sequence; identical to SEQ ID NO: 3978
  Description of Artificial Sequence: Synthetic oligonucleotide

SEQ ID NO: 10100 - DNA, 30 bp, Artificial Sequence; identical to SEQ ID NO: 3979
  Description of Artificial Sequence: Synthetic probe

SEQ ID NO: 10101 - DNA, 21 bp, Artificial Sequence
  Description of Artificial Sequence: Synthetic primer
tcactatcggcgtagtcacca

SEQ ID NO: 10102 - DNA, 20 bp, Artificial Sequence
  Description of Artificial Sequence: Synthetic primer
tcctccgggtaaagtcacca

SEQ ID NO: 10103 - DNA, 47 bp, Artificial Sequence; identical to SEQ ID NO: 3982
  Description of Artificial Sequence: Synthetic primer
  Description of Combined DNA/RNA Molecule: Synthetic primer

SEQ ID NO: 10104 - DNA, 52 bp, Artificial Sequence; identical to SEQ ID NO: 4136
  Description of Artificial Sequence: Synthetic primer
  Description of Combined DNA/RNA Molecule: Synthetic primer

SEQ ID NO: 10105 - DNA, 53 bp, Artificial Sequence; identical to SEQ ID NO: 4137
  Description of Artificial Sequence: Synthetic primer
  Description of Combined DNA/RNA Molecule: Synthetic primer

SEQ ID NO: 10106 - DNA, 50 bp, Artificial Sequence; identical to SEQ ID NO: 4138
  Description of Artificial Sequence: Synthetic primer
  Description of Combined DNA/RNA Molecule: Synthetic primer

SEQ ID NO: 10107 - DNA, 52 bp, Artificial Sequence; identical to SEQ ID NO: 4139
  Description of Artificial Sequence: Synthetic oligonucleotide
  Description of Combined DNA/RNA Molecule: Synthetic oligonucleotide

SEQ ID NO: 10108 - DNA, 53 bp, Artificial Sequence; identical to SEQ ID NO: 4140
  Description of Artificial Sequence: Synthetic oligonucleotide

SEQ ID NO: 10109 - DNA, 33 bp, Artificial Sequence; identical to SEQ ID NO: 4141
  Description of Artificial Sequence: Synthetic probe

SEQ ID NO: 10110 - DNA, 22 bp, Artificial Sequence
  Description of Artificial Sequence: Synthetic primer
tgtgcactagtccacgtgaaac

SEQ ID NO: 10111 - DNA, 22 bp, Artificial Sequence
  Description of Artificial Sequence: Synthetic primer
tgaatgcaaagatcgcggaaac

SEQ ID NO: 10112 - DNA, 47 bp, Artificial Sequence; identical to SEQ ID NO: 4144
  Description of Artificial Sequence: Synthetic primer
  Description of Combined DNA/RNA Molecule: Synthetic primer

SEQ ID NO: 10113 - DNA, 37 bp, Artificial Sequence; identical to SEQ ID NO: 5333
  Description of Artificial Sequence: Synthetic primer
  Description of Combined DNA/RNA Molecule: Synthetic primer

SEQ ID NO: 10114 - DNA, 41 bp, Artificial Sequence; identical to SEQ ID NO: 5334
  Description of Artificial Sequence: Synthetic primer
  Description of Combined DNA/RNA Molecule: Synthetic primer

SEQ ID NO: 10115 - DNA, 50 bp, Artificial Sequence; identical to SEQ ID NO: 5335
  Description of Artificial Sequence: Synthetic primer
  Description of Combined DNA/RNA Molecule: Synthetic primer

SEQ ID NO: 10116 - DNA, 44 bp, Artificial Sequence; identical to SEQ ID NO: 5336
  Description of Artificial Sequence: Synthetic oligonucleotide
  Description of Combined DNA/RNA Molecule: Synthetic oligonucleotide

SEQ ID NO: 10117 - DNA, 42 bp, Artificial Sequence; identical to SEQ ID NO: 5337
  Description of Artificial Sequence: Synthetic oligonucleotide

SEQ ID NO: 10118 - DNA, 27 bp, Artificial Sequence
  Description of Artificial Sequence: Synthetic probe
ttaatctcagaggcccacagccagtca

SEQ ID NO: 10119 - DNA, 19 bp, Artificial Sequence
  Description of Artificial Sequence: Synthetic primer
ttacaggccgcatagcaac

SEQ ID NO: 10120 - DNA, 19 bp, Artificial Sequence
  Description of Artificial Sequence: Synthetic primer
tgcgagcccatgtctcaac

SEQ ID NO: 10121 - DNA, 51 bp, Artificial Sequence; identical to SEQ ID NO: 5341
  Description of Artificial Sequence: Synthetic primer
  Description of Combined DNA/RNA Molecule: Synthetic primer

SEQ ID NO: 10122 - DNA, 40 bp, Artificial Sequence; identical to SEQ ID NO: 5460
  Description of Artificial Sequence: Synthetic primer
  Description of Combined DNA/RNA Molecule: Synthetic primer

SEQ ID NO: 10123 - DNA, 42 bp, Artificial Sequence; identical to SEQ ID NO: 5461
  Description of Artificial Sequence: Synthetic primer
  Description of Combined DNA/RNA Molecule: Synthetic primer

SEQ ID NO: 10124 - DNA, 47 bp, Artificial Sequence; identical to SEQ ID NO: 5462
  Description of Artificial Sequence: Synthetic primer
  Description of Combined DNA/RNA Molecule: Synthetic primer

SEQ ID NO: 10125 - DNA, 58 bp, Artificial Sequence; identical to SEQ ID NO: 5463
  Description of Artificial Sequence: Synthetic oligonucleotide
  Description of Combined DNA/RNA Molecule: Synthetic oligonucleotide

SEQ ID NO: 10126 - DNA, 51 bp, Artificial Sequence; identical to SEQ ID NO: 5464
  Description of Artificial Sequence: Synthetic oligonucleotide

SEQ ID NO: 10127 - DNA, 33 bp, Artificial Sequence; identical to SEQ ID NO: 5465
  Description of Artificial Sequence: Synthetic probe

SEQ ID NO: 10128 - DNA, 20 bp, Artificial Sequence
  Description of Artificial Sequence: Synthetic primer
tcgcggaaagtcccagtaac

SEQ ID NO: 10129 - DNA, 20 bp, Artificial Sequence
  Description of Artificial Sequence: Synthetic primer
tggaacgcttacaggccaac

SEQ ID NO: 10130 - DNA, 48 bp, Artificial Sequence; identical to SEQ ID NO: 5468
  Description of Artificial Sequence: Synthetic primer
  Description of Combined DNA/RNA Molecule: Synthetic primer

SEQ ID NO: 10131 - DNA, 42 bp, Artificial Sequence; identical to SEQ ID NO: 5505
  Description of Artificial Sequence: Synthetic primer
  Description of Combined DNA/RNA Molecule: Synthetic primer

SEQ ID NO: 10132 - DNA, 41 bp, Artificial Sequence; identical to SEQ ID NO: 5506
  Description of Artificial Sequence: Synthetic primer
  Description of Combined DNA/RNA Molecule: Synthetic primer

SEQ ID NO: 10133 - DNA, 50 bp, Artificial Sequence; identical to SEQ ID NO: 5507
  Description of Artificial Sequence: Synthetic primer
  Description of Combined DNA/RNA Molecule: Synthetic primer

SEQ ID NO: 10134 - DNA, 53 bp, Artificial Sequence; identical to SEQ ID NO: 5508
  Description of Artificial Sequence: Synthetic oligonucleotide
  Description of Combined DNA/RNA Molecule: Synthetic oligonucleotide

SEQ ID NO: 10135 - DNA, 51 bp, Artificial Sequence; identical to SEQ ID NO: 5509
  Description of Artificial Sequence: Synthetic oligonucleotide

SEQ ID NO: 10136 - DNA, 26 bp, Artificial Sequence
  Description of Artificial Sequence: Synthetic probe
aaggccgcatcccaaccagtttcaac

SEQ ID NO: 10137 - DNA, 21 bp, Artificial Sequence
  Description of Artificial Sequence: Synthetic primer
tctcgggaccacaatacgaac

SEQ ID NO: 10138 - DNA, 20 bp, Artificial Sequence
  Description of Artificial Sequence: Synthetic primer
tggcaccagcttagcgtaac

SEQ ID NO: 10139 - DNA, 46 bp, Artificial Sequence; identical to SEQ ID NO: 5513
  Description of Artificial Sequence: Synthetic primer
  Description of Combined DNA/RNA Molecule: Synthetic primer

SEQ ID NO: 10140 - DNA, 42 bp, Artificial Sequence; identical to SEQ ID NO: 5629
  Description of Artificial Sequence: Synthetic primer
  Description of Combined DNA/RNA Molecule: Synthetic primer

SEQ ID NO: 10141 - DNA, 46 bp, Artificial Sequence; identical to SEQ ID NO: 5630
  Description of Artificial Sequence: Synthetic primer
  Description of Combined DNA/RNA Molecule: Synthetic primer

SEQ ID NO: 10142 - DNA, 55 bp, Artificial Sequence; identical to SEQ ID NO: 5631
  Description of Artificial Sequence: Synthetic primer
  Description of Combined DNA/RNA Molecule: Synthetic primer

SEQ ID NO: 10143 - DNA, 48 bp, Artificial Sequence; identical to SEQ ID NO: 5632
  Description of Artificial Sequence: Synthetic oligonucleotide
  Description of Combined DNA/RNA Molecule: Synthetic oligonucleotide

SEQ ID NO: 10144 - DNA, 43 bp, Artificial Sequence; identical to SEQ ID NO: 5633
  Description of Artificial Sequence: Synthetic oligonucleotide

SEQ ID NO: 10145 - DNA, 23 bp, Artificial Sequence
  Description of Artificial Sequence: Synthetic probe
aaggtctcaggagcaggagacag

SEQ ID NO: 10146 - DNA, 22 bp, Artificial Sequence
  Description of Artificial Sequence: Synthetic primer
tggcgtaaggacactctgaaac

SEQ ID NO: 10147 - DNA, 19 bp, Artificial Sequence
  Description of Artificial Sequence: Synthetic primer
tggtccgcacagaggaaac

SEQ ID NO: 10148 - DNA, 49 bp, Artificial Sequence; identical to SEQ ID NO: 5637
  Description of Artificial Sequence: Synthetic primer
  Description of Combined DNA/RNA Molecule: Synthetic primer

SEQ ID NO: 10149 - DNA, 47 bp, Artificial Sequence; identical to SEQ ID NO: 632
  Description of Artificial Sequence: Synthetic primer
  Description of Combined DNA/RNA Molecule: Synthetic primer

SEQ ID NO: 10150 - DNA, 39 bp, Artificial Sequence; identical to SEQ ID NO: 633
  Description of Artificial Sequence: Synthetic primer
  Description of Combined DNA/RNA Molecule: Synthetic primer

SEQ ID NO: 10151 - DNA, 57 bp, Artificial Sequence; identical to SEQ ID NO: 5712
  Description of Artificial Sequence: Synthetic primer
  Description of Combined DNA/RNA Molecule: Synthetic primer

SEQ ID NO: 10152 - DNA, 48 bp, Artificial Sequence; identical to SEQ ID NO: 5713
  Description of Artificial Sequence: Synthetic oligonucleotide
  Description of Combined DNA/RNA Molecule: Synthetic oligonucleotide

SEQ ID NO: 10153 - DNA, 49 bp, Artificial Sequence; identical to SEQ ID NO: 5714
  Description of Artificial Sequence: Synthetic oligonucleotide

SEQ ID NO: 10154 - DNA, 24 bp, Artificial Sequence
  Description of Artificial Sequence: Synthetic probe
ttcctcgcaccttcatggccccaa

SEQ ID NO: 10155 - DNA, 19 bp, Artificial Sequence
  Description of Artificial Sequence: Synthetic primer
ttcgctgcccggttaaaca

SEQ ID NO: 10156 - DNA, 22 bp, Artificial Sequence
  Description of Artificial Sequence: Synthetic primer
tgtcgagctaggtccgataaca

SEQ ID NO: 10157 - DNA, 56 bp, Artificial Sequence; identical to SEQ ID NO: 5718
  Description of Artificial Sequence: Synthetic primer
  Description of Combined DNA/RNA Molecule: Synthetic primer

SEQ ID NO: 10158 - DNA, 52 bp, Artificial Sequence; identical to SEQ ID NO: 4564
  Description of Artificial Sequence: Synthetic primer
  Description of Combined DNA/RNA Molecule: Synthetic primer

SEQ ID NO: 10159 - DNA, 54 bp, Artificial Sequence; identical to SEQ ID NO: 4565
  Description of Artificial Sequence: Synthetic primer
  Description of Combined DNA/RNA Molecule: Synthetic primer

SEQ ID NO: 10160 - DNA, 51 bp, Artificial Sequence; identical to SEQ ID NO: 4566
  Description of Artificial Sequence: Synthetic primer
  Description of Combined DNA/RNA Molecule: Synthetic primer

SEQ ID NO: 10161 - DNA, 45 bp, Artificial Sequence; identical to SEQ ID NO: 4567
  Description of Artificial Sequence: Synthetic oligonucleotide
  Description of Combined DNA/RNA Molecule: Synthetic oligonucleotide

SEQ ID NO: 10162 - DNA, 52 bp, Artificial Sequence; identical to SEQ ID NO: 4568
  Description of Artificial Sequence: Synthetic oligonucleotide

SEQ ID NO: 10163 - DNA, 32 bp, Artificial Sequence; identical to SEQ ID NO: 4569
  Description of Artificial Sequence: Synthetic probe

SEQ ID NO: 10164 - DNA, 20 bp, Artificial Sequence
  Description of Artificial Sequence: Synthetic primer
tttttacgcacagcaccacc

SEQ ID NO: 10165 - DNA, 22 bp, Artificial Sequence
  Description of Artificial Sequence: Synthetic primer
tgtctaagccgcctatgtaacc

SEQ ID NO: 10166 - DNA, 48 bp, Artificial Sequence; identical to SEQ ID NO: 4572
  Description of Artificial Sequence: Synthetic primer
  Description of Combined DNA/RNA Molecule: Synthetic primer

SEQ ID NO: 10167 - DNA, 41 bp, Artificial Sequence; identical to SEQ ID NO: 5826
  Description of Artificial Sequence: Synthetic primer
  Description of Combined DNA/RNA Molecule: Synthetic primer

SEQ ID NO: 10168 - DNA, 40 bp, Artificial Sequence; identical to SEQ ID NO: 5827
  Description of Artificial Sequence: Synthetic primer
  Description of Combined DNA/RNA Molecule: Synthetic primer

SEQ ID NO: 10169 - DNA, 51 bp, Artificial Sequence; identical to SEQ ID NO: 5828
  Description of Artificial Sequence: Synthetic primer
  Description of Combined DNA/RNA Molecule: Synthetic primer

SEQ ID NO: 10170 - DNA, 47 bp, Artificial Sequence; identical to SEQ ID NO: 5829
  Description of Artificial Sequence: Synthetic oligonucleotide
  Description of Combined DNA/RNA Molecule: Synthetic oligonucleotide

SEQ ID NO: 10171 - DNA, 50 bp, Artificial Sequence; identical to SEQ ID NO: 5830
  Description of Artificial Sequence: Synthetic oligonucleotide

SEQ ID NO: 10172 - DNA, 31 bp, Artificial Sequence; identical to SEQ ID NO: 5831
  Description of Artificial Sequence: Synthetic probe

SEQ ID NO: 10173 - DNA, 21 bp, Artificial Sequence
  Description of Artificial Sequence: Synthetic primer
taacgggattgagagtggaca

SEQ ID NO: 10174 - DNA, 19 bp, Artificial Sequence
  Description of Artificial Sequence: Synthetic primer
ttagtaagggcggcagaca

SEQ ID NO: 10175 - DNA, 44 bp, Artificial Sequence; identical to SEQ ID NO: 5834
  Description of Artificial Sequence: Synthetic primer
  Description of Combined DNA/RNA Molecule: Synthetic primer

SEQ ID NO: 10176 - DNA, 48 bp, Artificial Sequence; identical to SEQ ID NO: 5922
  Description of Artificial Sequence: Synthetic primer
  Description of Combined DNA/RNA Molecule: Synthetic primer

SEQ ID NO: 10177 - DNA, 45 bp, Artificial Sequence; identical to SEQ ID NO: 5923
  Description of Artificial Sequence: Synthetic primer
  Description of Combined DNA/RNA Molecule: Synthetic primer

SEQ ID NO: 10178 - DNA, 48 bp, Artificial Sequence; identical to SEQ ID NO: 5924
  Description of Artificial Sequence: Synthetic primer
  Description of Combined DNA/RNA Molecule: Synthetic primer

SEQ ID NO: 10179 - DNA, 46 bp, Artificial Sequence; identical to SEQ ID NO: 5925
  Description of Artificial Sequence: Synthetic oligonucleotide
  Description of Combined DNA/RNA Molecule: Synthetic oligonucleotide

SEQ ID NO: 10180 - DNA, 49 bp, Artificial Sequence; identical to SEQ ID NO: 5926
  Description of Artificial Sequence: Synthetic oligonucleotide

SEQ ID NO: 10181 - DNA, 31 bp, Artificial Sequence; identical to SEQ ID NO: 5927
  Description of Artificial Sequence: Synthetic probe

SEQ ID NO: 10182 - DNA, 19 bp, Artificial Sequence
  Description of Artificial Sequence: Synthetic primer
ttgcaaaccacccggacaa

SEQ ID NO: 10183 - DNA, 20 bp, Artificial Sequence
  Description of Artificial Sequence: Synthetic primer
taggagtcgatgctgaccaa

SEQ ID NO: 10184 - DNA, 48 bp, Artificial Sequence; identical to SEQ ID NO: 5930
  Description of Artificial Sequence: Synthetic primer
  Description of Combined DNA/RNA Molecule: Synthetic primer

SEQ ID NO: 10185 - DNA, 43 bp, Artificial Sequence; identical to SEQ ID NO: 5994
  Description of Artificial Sequence: Synthetic primer
  Description of Combined DNA/RNA Molecule: Synthetic primer

SEQ ID NO: 10186 - DNA, 46 bp, Artificial Sequence; identical to SEQ ID NO: 5995
  Description of Artificial Sequence: Synthetic primer
  Description of Combined DNA/RNA Molecule: Synthetic primer

SEQ ID NO: 10187 - DNA, 56 bp, Artificial Sequence; identical to SEQ ID NO: 5996
  Description of Artificial Sequence: Synthetic primer
  Description of Combined DNA/RNA Molecule: Synthetic primer

SEQ ID NO: 10188 - DNA, 48 bp, Artificial Sequence; identical to SEQ ID NO: 5997
  Description of Artificial Sequence: Synthetic oligonucleotide
  Description of Combined DNA/RNA Molecule: Synthetic oligonucleotide

SEQ ID NO: 10189 - DNA, 53 bp, Artificial Sequence; identical to SEQ ID NO: 5998
  Description of Artificial Sequence: Synthetic oligonucleotide

SEQ ID NO: 10190 - DNA, 28 bp, Artificial Sequence
  Description of Artificial Sequence: Synthetic probe
tttgtgccacagggttccttaaccacaa

SEQ ID NO: 10191 - DNA, 19 bp, Artificial Sequence
  Description of Artificial Sequence: Synthetic primer
tctgccagaacaccgacac

SEQ ID NO: 10192 - DNA, 19 bp, Artificial Sequence
  Description of Artificial Sequence: Synthetic primer
tcaccgtacgccaacacac

SEQ ID NO: 10193 - DNA, 45 bp, Artificial Sequence; identical to SEQ ID NO: 6002
  Description of Artificial Sequence: Synthetic primer
  Description of Combined DNA/RNA Molecule: Synthetic primer

SEQ ID NO: 10194 - DNA, 40 bp, Artificial Sequence; identical to SEQ ID NO: 6030
  Description of Artificial Sequence: Synthetic primer
  Description of Combined DNA/RNA Molecule: Synthetic primer

SEQ ID NO: 10195 - DNA, 39 bp, Artificial Sequence; identical to SEQ ID NO: 6031
  Description of Artificial Sequence: Synthetic primer
  Description of Combined DNA/RNA Molecule: Synthetic primer

SEQ ID NO: 10196 - DNA, 52 bp, Artificial Sequence; identical to SEQ ID NO: 6032
  Description of Artificial Sequence: Synthetic primer
  Description of Combined DNA/RNA Molecule: Synthetic primer

SEQ ID NO: 10197 - DNA, 46 bp, Artificial Sequence; identical to SEQ ID NO: 6033
  Description of Artificial Sequence: Synthetic oligonucleotide
  Description of Combined DNA/RNA Molecule: Synthetic oligonucleotide

SEQ ID NO: 10198 - DNA, 47 bp, Artificial Sequence; identical to SEQ ID NO: 6034
  Description of Artificial Sequence: Synthetic oligonucleotide

SEQ ID NO: 10199 - DNA, 25 bp, Artificial Sequence
  Description of Artificial Sequence: Synthetic probe
tttcagacaggtctcaacccctcct

SEQ ID NO: 10200 - DNA, 21 bp, Artificial Sequence
  Description of Artificial Sequence: Synthetic primer
ttgaaggaggaaatcggcaca

SEQ ID NO: 10201 - DNA, 22 bp, Artificial Sequence
  Description of Artificial Sequence: Synthetic primer
tcagtcctaaaacggttcgaca

SEQ ID NO: 10202 - DNA, 45 bp, Artificial Sequence; identical to SEQ ID NO: 6038
  Description of Artificial Sequence: Synthetic primer
  Description of Combined DNA/RNA Molecule: Synthetic primer

SEQ ID NO: 10203 - DNA, 38 bp, Artificial Sequence; identical to SEQ ID NO: 6048
  Description of Artificial Sequence: Synthetic primer
  Description of Combined DNA/RNA Molecule: Synthetic primer

SEQ ID NO: 10204 - DNA, 38 bp, Artificial Sequence; identical to SEQ ID NO: 6049
  Description of Artificial Sequence: Synthetic primer
  Description of Combined DNA/RNA Molecule: Synthetic primer

SEQ ID NO: 10205 - DNA, 53 bp, Artificial Sequence; identical to SEQ ID NO: 6050
  Description of Artificial Sequence: Synthetic primer
  Description of Combined DNA/RNA Molecule: Synthetic primer

SEQ ID NO: 10206 - DNA, 49 bp, Artificial Sequence; identical to SEQ ID NO: 6051
  Description of Artificial Sequence: Synthetic oligonucleotide
  Description of Combined DNA/RNA Molecule: Synthetic oligonucleotide

SEQ ID NO: 10207 - DNA, 40 bp, Artificial Sequence; identical to SEQ ID NO: 6052
  Description of Artificial Sequence: Synthetic oligonucleotide

SEQ ID NO: 10208 - DNA, 25 bp, Artificial Sequence
  Description of Artificial Sequence: Synthetic probe
ccttcatcagctgtggcacccagca

SEQ ID NO: 10209 - DNA, 21 bp, Artificial Sequence
  Description of Artificial Sequence: Synthetic primer
tctcgacgatgaaaagcaaca

SEQ ID NO: 10210 - DNA, 19 bp, Artificial Sequence
  Description of Artificial Sequence: Synthetic primer
tccacggacagtacccaca

SEQ ID NO: 10211 - DNA, 53 bp, Artificial Sequence; identical to SEQ ID NO: 6056
  Description of Artificial Sequence: Synthetic primer
  Description of Combined DNA/RNA Molecule: Synthetic primer

SEQ ID NO: 10212 - DNA, 37 bp, Artificial Sequence; identical to SEQ ID NO: 6057
  Description of Artificial Sequence: Synthetic primer
  Description of Combined DNA/RNA Molecule: Synthetic primer

SEQ ID NO: 10213 - DNA, 40 bp, Artificial Sequence; identical to SEQ ID NO: 6058
  Description of Artificial Sequence: Synthetic primer
  Description of Combined DNA/RNA Molecule: Synthetic primer

SEQ ID NO: 10214 - DNA, 50 bp, Artificial Sequence; identical to SEQ ID NO: 6059
  Description of Artificial Sequence: Synthetic primer
  Description of Combined DNA/RNA Molecule: Synthetic primer

SEQ ID NO: 10215 - DNA, 45 bp, Artificial Sequence; identical to SEQ ID NO: 6060
  Description of Artificial Sequence: Synthetic oligonucleotide
  Description of Combined DNA/RNA Molecule: Synthetic oligonucleotide

SEQ ID NO: 10216 - DNA, 38 bp, Artificial Sequence; identical to SEQ ID NO: 6061
  Description of Artificial Sequence: Synthetic oligonucleotide

SEQ ID NO: 10217 - DNA, 25 bp, Artificial Sequence
  Description of Artificial Sequence: Synthetic probe
ttagtgacatggcagtgggctctgg

SEQ ID NO: 10218 - DNA, 20 bp, Artificial Sequence
  Description of Artificial Sequence: Synthetic primer
ttctaggcgacacgacaaca

SEQ ID NO: 10219 - DNA, 19 bp, Artificial Sequence
  Description of Artificial Sequence: Synthetic primer
tccacggacagtacccaca

SEQ ID NO: 10220 - DNA, 44 bp, Artificial Sequence; identical to SEQ ID NO: 6065
  Description of Artificial Sequence: Synthetic primer
  Description of Combined DNA/RNA Molecule: Synthetic primer

SEQ ID NO: 10221 - DNA, 41 bp, Artificial Sequence; identical to SEQ ID NO: 6066
  Description of Artificial Sequence: Synthetic primer
  Description of Combined DNA/RNA Molecule: Synthetic primer

SEQ ID NO: 10222 - DNA, 42 bp, Artificial Sequence; identical to SEQ ID NO: 6067
  Description of Artificial Sequence: Synthetic primer
  Description of Combined DNA/RNA Molecule: Synthetic primer

SEQ ID NO: 10223 - DNA, 54 bp, Artificial Sequence; identical to SEQ ID NO: 6068
  Description of Artificial Sequence: Synthetic primer
  Description of Combined DNA/RNA Molecule: Synthetic primer

SEQ ID NO: 10224 - DNA, 49 bp, Artificial Sequence; identical to SEQ ID NO: 6069
  Description of Artificial Sequence: Synthetic oligonucleotide
  Description of Combined DNA/RNA Molecule: Synthetic oligonucleotide

SEQ ID NO: 10225 - DNA, 56 bp, Artificial Sequence; identical to SEQ ID NO: 6070
  Description of Artificial Sequence: Synthetic oligonucleotide

SEQ ID NO: 10226 - DNA, 32 bp, Artificial Sequence; identical to SEQ ID NO: 6071
  Description of Artificial Sequence: Synthetic probe

SEQ ID NO: 10227 - DNA, 20 bp, Artificial Sequence
  Description of Artificial Sequence: Synthetic primer
tttcaggccctaaccaccac

SEQ ID NO: 10228 - DNA, 20 bp, Artificial Sequence
  Description of Artificial Sequence: Synthetic primer
tccatcgcccttaatcccac

SEQ ID NO: 10229 - DNA, 55 bp, Artificial Sequence; identical to SEQ ID NO: 6074
  Description of Artificial Sequence: Synthetic primer
  Description of Combined DNA/RNA Molecule: Synthetic primer

SEQ ID NO: 10230 - DNA, 40 bp, Artificial Sequence; identical to SEQ ID NO: 6200
  Description of Artificial Sequence: Synthetic primer
  Description of Combined DNA/RNA Molecule: Synthetic primer

SEQ ID NO: 10231 - DNA, 41 bp, Artificial Sequence; identical to SEQ ID NO: 6201
  Description of Artificial Sequence: Synthetic primer
  Description of Combined DNA/RNA Molecule: Synthetic primer

SEQ ID NO: 10232 - DNA, 50 bp, Artificial Sequence; identical to SEQ ID NO: 6202
  Description of Artificial Sequence: Synthetic primer
  Description of Combined DNA/RNA Molecule: Synthetic primer

SEQ ID NO: 10233 - DNA, 51 bp, Artificial Sequence; identical to SEQ ID NO: 6203
  Description of Artificial Sequence: Synthetic oligonucleotide
  Description of Combined DNA/RNA Molecule: Synthetic oligonucleotide

SEQ ID NO: 10234 - DNA, 57 bp, Artificial Sequence; identical to SEQ ID NO: 6204
  Description of Artificial Sequence: Synthetic oligonucleotide

SEQ ID NO: 10235 - DNA, 28 bp, Artificial Sequence
  Description of Artificial Sequence: Synthetic probe
ttctgttcactcaccccagacagatgcc

SEQ ID NO: 10236 - DNA, 22 bp, Artificial Sequence
  Description of Artificial Sequence: Synthetic primer
tacagatacggacgggaatcaa

SEQ ID NO: 10237 - DNA, 22 bp, Artificial Sequence
  Description of Artificial Sequence: Synthetic primer
tgacgcaggaggatgtaaacaa

SEQ ID NO: 10238 - DNA, 59 bp, Artificial Sequence; identical to SEQ ID NO: 6208
  Description of Artificial Sequence: Synthetic primer
  Description of Combined DNA/RNA Molecule: Synthetic primer

SEQ ID NO: 10239 - DNA, 41 bp, Artificial Sequence; identical to SEQ ID NO: 6954
  Description of Artificial Sequence: Synthetic primer
  Description of Combined DNA/RNA Molecule: Synthetic primer

SEQ ID NO: 10240 - DNA, 40 bp, Artificial Sequence; identical to SEQ ID NO: 6955
  Description of Artificial Sequence: Synthetic primer
  Description of Combined DNA/RNA Molecule: Synthetic primer

SEQ ID NO: 10241 - DNA, 52 bp, Artificial Sequence; identical to SEQ ID NO: 6956
  Description of Artificial Sequence: Synthetic primer
  Description of Combined DNA/RNA Molecule: Synthetic primer

SEQ ID NO: 10242 - DNA, 47 bp, Artificial Sequence; identical to SEQ ID NO: 6957
  Description of Artificial Sequence: Synthetic oligonucleotide
  Description of Combined DNA/RNA Molecule: Synthetic oligonucleotide

SEQ ID NO: 10243 - DNA, 47 bp, Artificial Sequence; identical to SEQ ID NO: 6958
  Description of Artificial Sequence: Synthetic oligonucleotide

SEQ ID NO: 10244 - DNA, 26 bp, Artificial Sequence
  Description of Artificial Sequence: Synthetic probe
ttgtggacatgtagggctggcagacc

SEQ ID NO: 10245 - DNA, 21 bp, Artificial Sequence
  Description of Artificial Sequence: Synthetic primer
tgcgactctattcacgtccaa

SEQ ID NO: 10246 - DNA, 21 bp, Artificial Sequence
  Description of Artificial Sequence: Synthetic primer
tggcggtacaccaaatagcaa

SEQ ID NO: 10247 - DNA, 49 bp, Artificial Sequence; identical to SEQ ID NO: 6962
  Description of Artificial Sequence: Synthetic primer
  Description of Combined DNA/RNA Molecule: Synthetic primer

SEQ ID NO: 10248 - DNA, 39 bp, Artificial Sequence
  Description of Artificial Sequence: Synthetic primer
  Description of Combined DNA/RNA Molecule: Synthetic primer
acgacgacgacgaaagaggtcagaggctcacacacccta

SEQ ID NO: 10249 - DNA, 39 bp, Artificial Sequence
  Description of Artificial Sequence: Synthetic primer
  Description of Combined DNA/RNA Molecule: Synthetic primer
acgacgacgacgaagggtcagaggctcacacaccctgcg

SEQ ID NO: 10250 - DNA, 49 bp, Artificial Sequence
  Description of Artificial Sequence: Synthetic primer
  Description of Combined DNA/RNA Molecule: Synthetic primer
acgacgacgacttgacgaacataatcctgaggagagggtggctccatcc

SEQ ID NO: 10251 - DNA, 50 bp, Artificial Sequence
  Description of Artificial Sequence: Synthetic oligonucleotide
  Description of Combined DNA/RNA Molecule: Synthetic oligonucleotide
ttcagcagcctggcatcacgcaatttcctcccatgagaatggacagggat

SEQ ID NO: 10252 - DNA, 41 bp, Artificial Sequence
  Description of Artificial Sequence: Synthetic oligonucleotide
ggagcagctccaggaagggtgggtggagcgctaaggttgca

SEQ ID NO: 10253 - DNA, 23 bp, Artificial Sequence
  Description of Artificial Sequence: Synthetic probe
ttatggacaggagcagctccagg

SEQ ID NO: 10254 - DNA, 19 bp, Artificial Sequence
  Description of Artificial Sequence: Synthetic primer
ttcagcagcctggcatcac

SEQ ID NO: 10255 - DNA, 19 bp, Artificial Sequence
  Description of Artificial Sequence: Synthetic primer
tgcaaccttagcgctccac

SEQ ID NO: 10256 - DNA, 44 bp, Artificial Sequence
  Description of Artificial Sequence: Synthetic primer
  Description of Combined DNA/RNA Molecule: Synthetic primer
tgcaaccttagcgctccacgggagagggtggctccatttgccat

SEQ ID NO: 10257 - DNA, 52 bp, Artificial Sequence; identical to SEQ ID NO: 4136
  Description of Artificial Sequence: Synthetic primer
  Description of Combined DNA/RNA Molecule: Synthetic primer

SEQ ID NO: 10258 - DNA, 53 bp, Artificial Sequence; identical to SEQ ID NO: 4137
  Description of Artificial Sequence: Synthetic primer
  Description of Combined DNA/RNA Molecule: Synthetic primer

SEQ ID NO: 10259 - DNA, 50 bp, Artificial Sequence; identical to SEQ ID NO: 4138
  Description of Artificial Sequence: Synthetic primer
  Description of Combined DNA/RNA Molecule: Synthetic primer

SEQ ID NO: 10260 - DNA, 47 bp, Artificial Sequence
  Description of Artificial Sequence: Synthetic oligonucleotide
  Description of Combined DNA/RNA Molecule: Synthetic oligonucleotide
ttgttcgcccgttggtcacggctagtccttgcagaagcaacauccga

SEQ ID NO: 10261 - DNA, 51 bp, Artificial Sequence
  Description of Artificial Sequence: Synthetic oligonucleotide
tccaggccctcaggtaacatttgaagagctgggtggagcgctaaggttgca

SEQ ID NO: 10262 - DNA, 27 bp, Artificial Sequence
  Description of Artificial Sequence: Synthetic probe
ttagcaacatccaggccctcaggtaac

SEQ ID NO: 10263 - DNA, 19 bp, Artificial Sequence
  Description of Artificial Sequence: Synthetic primer
ttgttcgcccgttggtcac

SEQ ID NO: 10264 - DNA, 19 bp, Artificial Sequence
  Description of Artificial Sequence: Synthetic primer
tgcaaccttagcgctccac

SEQ ID NO: 10265 - DNA, 45 bp, Artificial Sequence
  Description of Artificial Sequence: Synthetic primer
  Description of Combined DNA/RNA Molecule: Synthetic primer
tgcaaccttagcgctccactgccatgcagcagcctgaggtgctgt

SEQ ID NO: 10266 - DNA, 40 bp, Artificial Sequence
  Description of Artificial Sequence: Synthetic primer
  Description of Combined DNA/RNA Molecule: Synthetic primer
acgacgacgacgaagatgccagactcctgaggacactgga

SEQ ID NO: 10267 - DNA, 40 bp, Artificial Sequence
  Description of Artificial Sequence: Synthetic primer
  Description of Combined DNA/RNA Molecule: Synthetic primer
acgacgacgacgaacctcccagggatgccagactcctgga

SEQ ID NO: 10268 - DNA, 57 bp, Artificial Sequence
  Description of Artificial Sequence: Synthetic primer
  Description of Combined DNA/RNA Molecule: Synthetic primer
acgacgacgacttgacgaacataatggatgtgggatctgctgagattctgtcucaac

SEQ ID NO: 10269 - DNA, 48 bp, Artificial Sequence
  Description of Artificial Sequence: Synthetic oligonucleotide
  Description of Combined DNA/RNA Molecule: Synthetic oligonucleotide
tatcgcatcaaatggagagcaacccacagcacagcaggacgcacagag

SEQ ID NO: 10270 - DNA, 55 bp, Artificial Sequence
  Description of Artificial Sequence: Synthetic oligonucleotide
caggactcccacctctccacccagaattcattgttgaccgctgttatacgttgca

SEQ ID NO: 10271 - DNA, 25 bp, Artificial Sequence
  Description of Artificial Sequence: Synthetic probe
ttggacgcacaggactcccacctct

SEQ ID NO: 10272 - DNA, 22 bp, Artificial Sequence
  Description of Artificial Sequence: Synthetic primer
tatcgcatcaaatggagagcaa

SEQ ID NO: 10273 - DNA, 22 bp, Artificial Sequence
  Description of Artificial Sequence: Synthetic primer
tgcaacgtataacagcggtcaa

SEQ ID NO: 10274 - DNA, 57 bp, Artificial Sequence
  Description of Artificial Sequence: Synthetic primer
  Description of Combined DNA/RNA Molecule: Synthetic primer
tgcaacgtataacagcggtcaagctgagattctgtctcaatgaattctggatggagg

SEQ ID NO: 10275 - DNA, 41 bp, Artificial Sequence
  Description of Artificial Sequence: Synthetic primer
  Description of Combined DNA/RNA Molecule: Synthetic primer
acgacgacgacgaagctaggaggtcagcacacagcaggccg

SEQ ID NO: 10276 - DNA, 41 bp, Artificial Sequence
  Description of Artificial Sequence: Synthetic primer
  Description of Combined DNA/RNA Molecule: Synthetic primer
acgacgacgacgaagcagctaggaggtcagcacacagcaga

SEQ ID NO: 10277 - DNA, 52 bp, Artificial Sequence
  Description of Artificial Sequence: Synthetic primer
  Description of Combined DNA/RNA Molecule: Synthetic primer
acgacgacgacttgacgaacataatctccagctgtgagaagctgggcaaggc

SEQ ID NO: 10278 - DNA, 47 bp, Artificial Sequence
  Description of Artificial Sequence: Synthetic oligonucleotide
  Description of Combined DNA/RNA Molecule: Synthetic oligonucleotide
tcctagtacctacagtgggcaagccaggtcaggactgggccaagcga

SEQ ID NO: 10279 - DNA, 45 bp, Artificial Sequence
  Description of Artificial Sequence: Synthetic oligonucleotide
agcagacagagctgcagcccccattgaccgctgttatacgttgca

SEQ ID NO: 10280 - DNA, 24 bp, Artificial Sequence
  Description of Artificial Sequence: Synthetic probe
tttgggccaagcagacagagctgc

SEQ ID NO: 10281 - DNA, 22 bp, Artificial Sequence
  Description of Artificial Sequence: Synthetic primer
tcctagtacctacagtgggcaa

SEQ ID NO: 10282 - DNA, 22 bp, Artificial Sequence
  Description of Artificial Sequence: Synthetic primer
tgcaacgtataacagcggtcaa

SEQ ID NO: 10283 - DNA, 49 bp, Artificial Sequence
  Description of Artificial Sequence: Synthetic primer
  Description of Combined DNA/RNA Molecule: Synthetic primer
tgcaacgtataacagcggtcaagctgtgagaagctgggcaagatgggaa

SEQ ID NO: 10284 - DNA, 48 bp, Artificial Sequence
  Description of Artificial Sequence: Synthetic primer
  Description of Combined DNA/RNA Molecule: Synthetic primer
acgacgacgacgaaggttcaatgttaaatgaaccttcaggccaccagg

SEQ ID NO: 10285 - DNA, 50 bp, Artificial Sequence
  Description of Artificial Sequence: Synthetic primer
  Description of Combined DNA/RNA Molecule: Synthetic primer
acgacgacgacgaagacatcagaggcaatacaggttcaatgttaaatgag

SEQ ID NO: 10286 - DNA, 60 bp, Artificial Sequence
  Description of Artificial Sequence: Synthetic primer
  Description of Combined DNA/RNA Molecule: Synthetic primer
acgacgacgacttgacgaacataatcatgtgaaataaagaagtggtgggagctgagcata

SEQ ID NO: 10287 - DNA, 52 bp, Artificial Sequence
  Description of Artificial Sequence: Synthetic oligonucleotide
  Description of Combined DNA/RNA Molecule: Synthetic oligonucleotide
tagtttgtcgaaagtcccacaccagacaatggcacagacctcacgcagggat

SEQ ID NO: 10288 - DNA, 43 bp, Artificial Sequence
  Description of Artificial Sequence: Synthetic oligonucleotide
ggagcaccacaccttcccccaggtgcaaaattcaggctgtgca

SEQ ID NO: 10289 - DNA, 21 bp, Artificial Sequence
  Description of Artificial Sequence: Synthetic probe
tttcacgcaggagcaccacac

SEQ ID NO: 10290 - DNA, 22 bp, Artificial Sequence
  Description of Artificial Sequence: Synthetic primer
tagtttgtcgaaagtcccacac

SEQ ID NO: 10291 - DNA, 21 bp, Artificial Sequence
  Description of Artificial Sequence: Synthetic primer
tgcacagcctgaattttgcac

SEQ ID NO: 10292 - DNA, 50 bp, Artificial Sequence
  Description of Artificial Sequence: Synthetic primer
  Description of Combined DNA/RNA Molecule: Synthetic primer
tgcacagcctgaattttgcacaaagaagtggtgggagctgagcgtggcta

SEQ ID NO: 10293 - DNA, 44 bp, Artificial Sequence; identical to SEQ ID NO: 9989
  Description of Artificial Sequence: Synthetic primer
  Description of Combined DNA/RNA Molecule: Synthetic primer

SEQ ID NO: 10294 - DNA, 47 bp, Artificial Sequence
  Description of Artificial Sequence: Synthetic primer
  Description of Combined DNA/RNA Molecule: Synthetic primer
acgacgacgacgaacctacacagagcacaccaagcataagacagtcg

SEQ ID NO: 10295 - DNA, 64 bp, Artificial Sequence
  Description of Artificial Sequence: Synthetic primer
  Description of Combined DNA/RNA Molecule: Synthetic primer
acgacgacgacttgacgaacataatcttttatgggtgagctgttaaataaaaagctggggtgaa

SEQ ID NO: 10296 - DNA, 49 bp, Artificial Sequence
  Description of Artificial Sequence: Synthetic oligonucleotide
  Description of Combined DNA/RNA Molecule: Synthetic oligonucleotide
tagacacgagcgaggtcactctacacactcaagcaccagggccacacct

SEQ ID NO: 10297 - DNA, 51 bp, Artificial Sequence
  Description of Artificial Sequence: Synthetic oligonucleotide
cactctgtacagctttggtggctgagcctcgtgcaaaattcaggctgtgca

SEQ ID NO: 10298 - DNA, 25 bp, Artificial Sequence
  Description of Artificial Sequence: Synthetic probe
agggccacactctgtacagctttgg

SEQ ID NO: 10299 - DNA, 19 bp, Artificial Sequence
  Description of Artificial Sequence: Synthetic primer
tagacacgagcgaggtcac

SEQ ID NO: 10300 - DNA, 21 bp, Artificial Sequence
  Description of Artificial Sequence: Synthetic primer
tgcacagcctgaattttgcac

SEQ ID NO: 10301 - DNA, 45 bp, Artificial Sequence
  Description of Artificial Sequence: Synthetic primer
  Description of Combined DNA/RNA Molecule: Synthetic primer
acgacgacgacgaatcatcctagagttggaggactgagcagtgga

SEQ ID NO: 10302 - DNA, 47 bp, Artificial Sequence
  Description of Artificial Sequence: Synthetic primer
  Description of Combined DNA/RNA Molecule: Synthetic primer
acgacgacgacgaacatcctagagttggaggactgagcagtgggccg

SEQ ID NO: 10303 - DNA, 51 bp, Artificial Sequence
  Description of Artificial Sequence: Synthetic primer
  Description of Combined DNA/RNA Molecule: Synthetic primer
acgacgacgacttgacgaacataatgctgggagtgccacctcagtccccct

SEQ ID NO: 10304 - DNA, 55 bp, Artificial Sequence
  Description of Artificial Sequence: Synthetic oligonucleotide
  Description of Combined DNA/RNA Molecule: Synthetic oligonucleotide
taccctcctagctccgtacagccaggacaagcaacagatgaagtatcccagaaat

SEQ ID NO: 10305 - DNA, 45 bp, Artificial Sequence
  Description of Artificial Sequence: Synthetic oligonucleotide
gaagccagagaagggtggtctgaggctgtgttgtctggtggtgca

SEQ ID NO: 10306 - DNA, 28 bp, Artificial Sequence
  Description of Artificial Sequence: Synthetic probe
tttatcccagaagccagagaagggtggt

SEQ ID NO: 10307 - DNA, 20 bp, Artificial Sequence
  Description of Artificial Sequence: Synthetic primer
taccctcctagctccgtaca

SEQ ID NO: 10308 - DNA, 19 bp, Artificial Sequence
  Description of Artificial Sequence: Synthetic primer
tgcaccaccagacaacaca

SEQ ID NO: 10309 - DNA, 42 bp, Artificial Sequence
  Description of Artificial Sequence: Synthetic primer
  Description of Combined DNA/RNA Molecule: Synthetic primer
tgcaccaccagacaacacacccactgccccaccctatgcata

SEQ ID NO: 10310 - DNA, 39 bp, Artificial Sequence
  Description of Artificial Sequence: Synthetic primer
  Description of Combined DNA/RNA Molecule: Synthetic primer
acgacgacgacgaactggctcagagtcccaggcaacaga

SEQ ID NO: 10311 - DNA, 40 bp, Artificial Sequence
  Description of Artificial Sequence: Synthetic primer
  Description of Combined DNA/RNA Molecule: Synthetic primer
acgacgacgacgaaggctcagagtcccaggcaacaggcat

SEQ ID NO: 10312 - DNA, 51 bp, Artificial Sequence
  Description of Artificial Sequence: Synthetic primer
  Description of Combined DNA/RNA Molecule: Synthetic primer
acgacgacgacttgacgaacataatccagaggagtctggctttggcacaga

SEQ ID NO: 10313 - DNA, 47 bp, Artificial Sequence
  Description of Artificial Sequence: Synthetic oligonucleotide
  Description of Combined DNA/RNA Molecule: Synthetic oligonucleotide
tcatcgccctcagatcttccacacttccctcccagcaccgcagcctt

SEQ ID NO: 10314 - DNA, 44 bp, Artificial Sequence
  Description of Artificial Sequence: Synthetic oligonucleotide
gccccctcccacttccccaacagtggaggatagattggagggca

SEQ ID NO: 10315 - DNA, 19 bp, Artificial Sequence
  Description of Artificial Sequence: Synthetic probe
ttcaccgcagccccctccc

SEQ ID NO: 10316 - DNA, 21 bp, Artificial Sequence
  Description of Artificial Sequence: Synthetic primer
tcatcgccctcagatcttcca

SEQ ID NO: 10317 - DNA, 21 bp, Artificial Sequence
  Description of Artificial Sequence: Synthetic primer
tgccctccaatctatcctcca

SEQ ID NO: 10318 - DNA, 46 bp, Artificial Sequence
  Description of Artificial Sequence: Synthetic primer
  Description of Combined DNA/RNA Molecule: Synthetic primer
tgccctccaatctatcctccactttggcacaggaagggactgggcc

SEQ ID NO: 10319 - DNA, 42 bp, Artificial Sequence
  Description of Artificial Sequence: Synthetic primer
  Description of Combined DNA/RNA Molecule: Synthetic primer
acgacgacgacgaacctccagggaatgaatggctgcaacata

SEQ ID NO: 10320 - DNA, 42 bp, Artificial Sequence
  Description of Artificial Sequence: Synthetic primer
  Description of Combined DNA/RNA Molecule: Synthetic primer
acgacgacgacgaaccagggaatgaatggctgcaacauggga

SEQ ID NO: 10321 - DNA, 53 bp, Artificial Sequence
  Description of Artificial Sequence: Synthetic primer
  Description of Combined DNA/RNA Molecule: Synthetic primer
acgacgacgacttgacgaacataatccaggagtgcaggtccttgttcagggaa

SEQ ID NO: 10322 - DNA, 45 bp, Artificial Sequence
  Description of Artificial Sequence: Synthetic oligonucleotide
  Description of Combined DNA/RNA Molecule: Synthetic oligonucleotide
taaccagttaccaccgccagcccaacagacacctccttcacagac

SEQ ID NO: 10323 - DNA, 54 bp, Artificial Sequence
  Description of Artificial Sequence: Synthetic oligonucleotide
caggtatcaccagcacacatacaacagcaaggatggaggatagattggagggca

SEQ ID NO: 10324 - DNA, 30 bp, Artificial Sequence
  Description of Artificial Sequence: Synthetic probe
tttccttcacaggtatcaccagcacacata

SEQ ID NO: 10325 - DNA, 19 bp, Artificial Sequence
  Description of Artificial Sequence: Synthetic primer
taaccagttaccaccgcca

SEQ ID NO: 10326 - DNA, 21 bp, Artificial Sequence
  Description of Artificial Sequence: Synthetic primer
tgccctccaatctatcctcca

SEQ ID NO: 10327 - DNA, 56 bp, Artificial Sequence
  Description of Artificial Sequence: Synthetic primer
  Description of Combined DNA/RNA Molecule: Synthetic primer
tgccctccaatctatcctccacttgttcagggagatgtaatccttgctgctgtata

SEQ ID NO: 10328 - DNA, 47 bp, Artificial Sequence
  Description of Artificial Sequence: Synthetic primer
  Description of Combined DNA/RNA Molecule: Synthetic primer
acgacgacgacgaaacaagtggttccttaacagaccacaacaggtga

SEQ ID NO: 10329 - DNA, 46 bp, Artificial Sequence
  Description of Artificial Sequence: Synthetic primer
  Description of Combined DNA/RNA Molecule: Synthetic primer
acgacgacgacgaaagtggttccttaacagaccacaacagguggcg

SEQ ID NO: 10330 - DNA, 56 bp, Artificial Sequence
  Description of Artificial Sequence: Synthetic primer
  Description of Combined DNA/RNA Molecule: Synthetic primer
acgacgacgacttgacgaacataatattggcctgttggttaccagtgtgtcctgcg

SEQ ID NO: 10331 - DNA, 51 bp, Artificial Sequence
  Description of Artificial Sequence: Synthetic oligonucleotide
  Description of Combined DNA/RNA Molecule: Synthetic oligonucleotide
tcgcaccggaattctgaccgcagagagatctgggtgacctgacccaggcgc

SEQ ID NO: 10332 - DNA, 42 bp, Artificial Sequence
  Description of Artificial Sequence: Synthetic oligonucleotide
ggcatccatcccccagcctgggggtagtttcccatgacggca

SEQ ID NO: 10333 - DNA, 23 bp, Artificial Sequence
  Description of Artificial Sequence: Synthetic probe
tttgacccaggcatccatccccc

SEQ ID NO: 10334 - DNA, 19 bp, Artificial Sequence
  Description of Artificial Sequence: Synthetic primer
tcgcaccggaattctgacc

SEQ ID NO: 10335 - DNA, 20 bp, Artificial Sequence
  Description of Artificial Sequence: Synthetic primer
tgccgtcatgggaaactacc

SEQ ID NO: 10336 - DNA, 49 bp, Artificial Sequence
  Description of Artificial Sequence: Synthetic primer
  Description of Combined DNA/RNA Molecule: Synthetic primer
tgccgtcatgggaaactaccgcctgttggttaccagtgtgtcttgcagt

SEQ ID NO: 10337 - DNA, 39 bp, Artificial Sequence
  Description of Artificial Sequence: Synthetic primer
  Description of Combined DNA/RNA Molecule: Synthetic primer
acgacgacgacgaaggaggagccagcagctcacauggga

SEQ ID NO: 10338 - DNA, 40 bp, Artificial Sequence
  Description of Artificial Sequence: Synthetic primer
  Description of Combined DNA/RNA Molecule: Synthetic primer
acgacgacgacgaacacagtggaggagccagcagcucacg

SEQ ID NO: 10339 - DNA, 55 bp, Artificial Sequence
  Description of Artificial Sequence: Synthetic primer
  Description of Combined DNA/RNA Molecule: Synthetic primer
acgacgacgacttgacgaacataatgtcaatcagtctgtgcctgctgtccccgga

SEQ ID NO: 10340 - DNA, 46 bp, Artificial Sequence
  Description of Artificial Sequence: Synthetic oligonucleotide
  Description of Combined DNA/RNA Molecule: Synthetic oligonucleotide
tgcttacccacgatgcaccgggctcaggatcttgaggatcacaatg

SEQ ID NO: 10341 - DNA, 44 bp, Artificial Sequence
  Description of Artificial Sequence: Synthetic oligonucleotide
caacaccagggaaccctggagcccggtcgtatgacttgctcgca

SEQ ID NO: 10342 - DNA, 25 bp, Artificial Sequence
  Description of Artificial Sequence: Synthetic probe
aagggatcacaacaccagggaaccc

SEQ ID NO: 10343 - DNA, 19 bp, Artificial Sequence
  Description of Artificial Sequence: Synthetic primer
tgcttacccacgatgcacc

SEQ ID NO: 10344 - DNA, 20 bp, Artificial Sequence
  Description of Artificial Sequence: Synthetic primer
tgcgagcaagtcatacgacc

SEQ ID NO: 10345 - DNA, 45 bp, Artificial Sequence
  Description of Artificial Sequence: Synthetic primer
  Description of Combined DNA/RNA Molecule: Synthetic primer
tgcgagcaagtcatacgaccgtctgtgcctgctgtcccttgggag

SEQ ID NO: 10346 - DNA, 49 bp, Artificial Sequence
  Description of Artificial Sequence: Synthetic primer
  Description of Combined DNA/RNA Molecule: Synthetic primer
acgacgacgacgaagcctcagtcacttaaagatcacaaaacccaagcct

SEQ ID NO: 10347 - DNA, 51 bp, Artificial Sequence
  Description of Artificial Sequence: Synthetic primer
  Description of Combined DNA/RNA Molecule: Synthetic primer
acgacgacgacgaagatctgcctcagtcacttaaagatcacaaaacccaaa

SEQ ID NO: 10348 - DNA, 48 bp, Artificial Sequence
  Description of Artificial Sequence: Synthetic primer
  Description of Combined DNA/RNA Molecule: Synthetic primer
acgacgacgacttgacgaacataatcaggtgctggtgggtgccccaga

SEQ ID NO: 10349 - DNA, 49 bp, Artificial Sequence
  Description of Artificial Sequence: Synthetic oligonucleotide
  Description of Combined DNA/RNA Molecule: Synthetic oligonucleotide
ttacaggccgcatagcaacccctggacacactctgattggatcagctag

SEQ ID NO: 10350 - DNA, 47 bp, Artificial Sequence
  Description of Artificial Sequence: Synthetic oligonucleotide
gctgagctgcttcaccacatagccctgggttgagacatgggctcgca

SEQ ID NO: 10351 - DNA, 27 bp, Artificial Sequence
  Description of Artificial Sequence: Synthetic probe
cctggatcagctgagctgcttcaccac

SEQ ID NO: 10352 - DNA, 19 bp, Artificial Sequence
  Description of Artificial Sequence: Synthetic primer
ttacaggccgcatagcaac

SEQ ID NO: 10353 - DNA, 19 bp, Artificial Sequence
  Description of Artificial Sequence: Synthetic primer
tgcgagcccatgtctcaac

SEQ ID NO: 10354 - DNA, 37 bp, Artificial Sequence
  Description of Artificial Sequence: Synthetic primer
  Description of Combined DNA/RNA Molecule: Synthetic primer
acgacgacgacgaagggcctccaagggctccagagcg

SEQ ID NO: 10355 - DNA, 39 bp, Artificial Sequence
  Description of Artificial Sequence: Synthetic primer
  Description of Combined DNA/RNA Molecule: Synthetic primer
acgacgacgacgaagggcctccaagggctccagagcagt

SEQ ID NO: 10356 - DNA, 51 bp, Artificial Sequence
  Description of Artificial Sequence: Synthetic primer
  Description of Combined DNA/RNA Molecule: Synthetic primer
acgacgacgacttgacgaacataatcccagaactcctgcccctgaacttcg

SEQ ID NO: 10357 - DNA, 44 bp, Artificial Sequence
  Description of Artificial Sequence: Synthetic oligonucleotide
  Description of Combined DNA/RNA Molecule: Synthetic oligonucleotide
ttcgcctaccgcagtgaacgcaactggcaagccatgacactgaa

SEQ ID NO: 10358 - DNA, 48 bp, Artificial Sequence
  Description of Artificial Sequence: Synthetic oligonucleotide
ctggagctgcagcacacaaggtactgaaggttgagacatgggctcgca

SEQ ID NO: 10359 - DNA, 24 bp, Artificial Sequence
  Description of Artificial Sequence: Synthetic probe
ttcatgacactggagctgcagcac

SEQ ID NO: 10360 - DNA, 19 bp, Artificial Sequence
  Description of Artificial Sequence: Synthetic primer
ttcgcctaccgcagtgaac

SEQ ID NO: 10361 - DNA, 19 bp, Artificial Sequence
  Description of Artificial Sequence: Synthetic primer
tgcgagcccatgtctcaac

SEQ ID NO: 10362 - DNA, 36 bp, Artificial Sequence
  Description of Artificial Sequence: Synthetic primer
  Description of Combined DNA/RNA Molecule: Synthetic primer
acgacgacgacgaacaggctgcccacagccaggagt

SEQ ID NO: 10363 - DNA, 37 bp, Artificial Sequence
  Description of Artificial Sequence: Synthetic primer
  Description of Combined DNA/RNA Molecule: Synthetic primer
acgacgacgacgaacaccaggctgcccacagccaggg

SEQ ID NO: 10364 - DNA, 57 bp, Artificial Sequence
  Description of Artificial Sequence: Synthetic primer
  Description of Combined DNA/RNA Molecule: Synthetic primer
acgacgacgacttgacgaacataataaacaaggttttgccttgtgttgcagauaggc

SEQ ID NO: 10365 - DNA, 48 bp, Artificial Sequence
  Description of Artificial Sequence: Synthetic oligonucleotide
  Description of Combined DNA/RNA Molecule: Synthetic oligonucleotide
ttgcatttcgttagcgacacagagcataaggccagggtccgcaccttg

SEQ ID NO: 10366 - DNA, 51 bp, Artificial Sequence
  Description of Artificial Sequence: Synthetic oligonucleotide
cctcaattttcagtgtccacagcccctaccctgtgagtcgatctacccgca

SEQ ID NO: 10367 - DNA, 31 bp, Artificial Sequence
  Description of Artificial Sequence: Synthetic probe
ttgtccgcacctcaattttcagtgtccacag

SEQ ID NO: 10368 - DNA, 21 bp, Artificial Sequence
  Description of Artificial Sequence: Synthetic primer
ttgcatttcgttagcgacaca

SEQ ID NO: 10369 - DNA, 20 bp, Artificial Sequence
  Description of Artificial Sequence: Synthetic primer
tgcgggtagatcgactcaca

SEQ ID NO: 10370 - DNA, 51 bp, Artificial Sequence
  Description of Artificial Sequence: Synthetic primer
  Description of Combined DNA/RNA Molecule: Synthetic primer
tgcgggtagatcgactcacaggttttgccttgtgttgcagatagatgggtg

SEQ ID NO: 10371 - DNA, 41 bp, Artificial Sequence; identical to SEQ ID NO: 1004
  Description of Artificial Sequence: Synthetic primer
  Description of Combined DNA/RNA Molecule: Synthetic primer

SEQ ID NO: 10372 - DNA, 44 bp, Artificial Sequence; identical to SEQ ID NO: 1005
  Description of Artificial Sequence: Synthetic primer
  Description of Combined DNA/RNA Molecule: Synthetic primer

SEQ ID NO: 10373 - DNA, 53 bp, Artificial Sequence; identical to SEQ ID NO: 1006
  Description of Artificial Sequence: Synthetic primer
  Description of Combined DNA/RNA Molecule: Synthetic primer

SEQ ID NO: 10374 - DNA, 46 bp, Artificial Sequence; identical to SEQ ID NO: 1007
  Description of Artificial Sequence: Synthetic oligonucleotide
  Description of Combined DNA/RNA Molecule: Synthetic oligonucleotide

SEQ ID NO: 10375 - DNA, 48 bp, Artificial Sequence; identical to SEQ ID NO: 1008
  Description of Artificial Sequence: Synthetic oligonucleotide

SEQ ID NO: 10376 - DNA, 19 bp, Artificial Sequence
  Description of Artificial Sequence: Synthetic probe
ttgcccccaggccccaaca

SEQ ID NO: 10377 - DNA, 22 bp, Artificial Sequence
  Description of Artificial Sequence: Synthetic primer
tatctcctaaaagaagccgcac

SEQ ID NO: 10378 - DNA, 20 bp, Artificial Sequence
  Description of Artificial Sequence: Synthetic primer
tccatcgcccttaatcccac

SEQ ID NO: 10379 - DNA, 48 bp, Artificial Sequence; identical to SEQ ID NO: 1012
  Description of Artificial Sequence: Synthetic primer
  Description of Combined DNA/RNA Molecule: Synthetic primer

SEQ ID NO: 10380 - DNA, 25 bp, Artificial Sequence
  Description of Artificial Sequence: Synthetic primer
  Description of Combined DNA/RNA Molecule: Synthetic primer
acgacgacgacttgacgaacataac

SEQ ID NO: 10381 - DNA, 48 bp, Artificial Sequence; identical to SEQ ID NO: 1057
  Description of Artificial Sequence: Synthetic primer
  Description of Combined DNA/RNA Molecule: Synthetic primer

SEQ ID NO: 10382 - DNA, 51 bp, Artificial Sequence; identical to SEQ ID NO: 1058
  Description of Artificial Sequence: Synthetic primer
  Description of Combined DNA/RNA Molecule: Synthetic primer

SEQ ID NO: 10383 - DNA, 45 bp, Artificial Sequence; identical to SEQ ID NO: 1059
  Description of Artificial Sequence: Synthetic oligonucleotide
  Description of Combined DNA/RNA Molecule: Synthetic oligonucleotide

SEQ ID NO: 10384 - DNA, 44 bp, Artificial Sequence; identical to SEQ ID NO: 1060
  Description of Artificial Sequence: Synthetic oligonucleotide

SEQ ID NO: 10385 - DNA, 27 bp, Artificial Sequence
  Description of Artificial Sequence: Synthetic probe
ttctccgcatccaggcaatcttccctg

SEQ ID NO: 10386 - DNA, 20 bp, Artificial Sequence
  Description of Artificial Sequence: Synthetic primer
tctacagctagatgcggcca

SEQ ID NO: 10387 - DNA, 20 bp, Artificial Sequence
  Description of Artificial Sequence: Synthetic primer
tcgacagagtaacggagcca

SEQ ID NO: 10388 - DNA, 45 bp, Artificial Sequence; identical to SEQ ID NO: 1064
  Description of Artificial Sequence: Synthetic primer
  Description of Combined DNA/RNA Molecule: Synthetic primer

SEQ ID NO: 10389 - DNA, 42 bp, Artificial Sequence; identical to SEQ ID NO: 119
  Description of Artificial Sequence: Synthetic primer
  Description of Combined DNA/RNA Molecule: Synthetic primer

SEQ ID NO: 10390 - DNA, 40 bp, Artificial Sequence; identical to SEQ ID NO: 120
  Description of Artificial Sequence: Synthetic primer
  Description of Combined DNA/RNA Molecule: Synthetic primer

SEQ ID NO: 10391 - DNA, 48 bp, Artificial Sequence; identical to SEQ ID NO: 1298
  Description of Artificial Sequence: Synthetic primer
  Description of Combined DNA/RNA Molecule: Synthetic primer

SEQ ID NO: 10392 - DNA, 45 bp, Artificial Sequence; identical to SEQ ID NO: 1299
  Description of Artificial Sequence: Synthetic oligonucleotide
  Description of Combined DNA/RNA Molecule: Synthetic oligonucleotide

SEQ ID NO: 10393 - DNA, 49 bp, Artificial Sequence; identical to SEQ ID NO: 1300
  Description of Artificial Sequence: Synthetic oligonucleotide

SEQ ID NO: 10394 - DNA, 30 bp, Artificial Sequence; identical to SEQ ID NO: 1301
  Description of Artificial Sequence: Synthetic probe

SEQ ID NO: 10395 - DNA, 19 bp, Artificial Sequence
  Description of Artificial Sequence: Synthetic primer
tcgcaccggaattctgacc

SEQ ID NO: 10396 - DNA, 20 bp, Artificial Sequence
  Description of Artificial Sequence: Synthetic primer
tgccgtcatgggaaactacc

SEQ ID NO: 10397 - DNA, 44 bp, Artificial Sequence; identical to SEQ ID NO: 1304
  Description of Artificial Sequence: Synthetic primer
  Description of Combined DNA/RNA Molecule: Synthetic primer

SEQ ID NO: 10398 - DNA, 41 bp, Artificial Sequence; identical to SEQ ID NO: 1409
  Description of Artificial Sequence: Synthetic primer
  Description of Combined DNA/RNA Molecule: Synthetic primer

SEQ ID NO: 10399 - DNA, 44 bp, Artificial Sequence; identical to SEQ ID NO: 1410
  Description of Artificial Sequence: Synthetic primer
  Description of Combined DNA/RNA Molecule: Synthetic primer

SEQ ID NO: 10400 - DNA, 50 bp, Artificial Sequence; identical to SEQ ID NO: 1411
  Description of Artificial Sequence: Synthetic primer
  Description of Combined DNA/RNA Molecule: Synthetic primer

SEQ ID NO: 10401 - DNA, 44 bp, Artificial Sequence; identical to SEQ ID NO: 1412
  Description of Artificial Sequence: Synthetic oligonucleotide
  Description of Combined DNA/RNA Molecule: Synthetic oligonucleotide

SEQ ID NO: 10402 - DNA, 47 bp, Artificial Sequence; identical to SEQ ID NO: 1413
  Description of Artificial Sequence: Synthetic oligonucleotide

SEQ ID NO: 10403 - DNA, 22 bp, Artificial Sequence
  Description of Artificial Sequence: Synthetic probe
ttgggttcagctggccagaggc

SEQ ID NO: 10404 - DNA, 19 bp, Artificial Sequence
  Description of Artificial Sequence: Synthetic primer
ttgcaacaggctaccgacc

SEQ ID NO: 10405 - DNA, 21 bp, Artificial Sequence
  Description of Artificial Sequence: Synthetic primer
tgcgtgacttccttacctacc

SEQ ID NO: 10406 - DNA, 46 bp, Artificial Sequence; identical to SEQ ID NO: 1417
  Description of Artificial Sequence: Synthetic primer
  Description of Combined DNA/RNA Molecule: Synthetic primer

SEQ ID NO: 10407 - DNA, 41 bp, Artificial Sequence; identical to SEQ ID NO: 1577
  Description of Artificial Sequence: Synthetic primer
  Description of Combined DNA/RNA Molecule: Synthetic primer

SEQ ID NO: 10408 - DNA, 39 bp, Artificial Sequence; identical to SEQ ID NO: 1578
  Description of Artificial Sequence: Synthetic primer
  Description of Combined DNA/RNA Molecule: Synthetic primer

SEQ ID NO: 10409 - DNA, 51 bp, Artificial Sequence; identical to SEQ ID NO: 1579
  Description of Artificial Sequence: Synthetic primer
  Description of Combined DNA/RNA Molecule: Synthetic primer

SEQ ID NO: 10410 - DNA, 45 bp, Artificial Sequence; identical to SEQ ID NO: 1580
  Description of Artificial Sequence: Synthetic oligonucleotide
  Description of Combined DNA/RNA Molecule: Synthetic oligonucleotide

SEQ ID NO: 10411 - DNA, 42 bp, Artificial Sequence; identical to SEQ ID NO: 1581
  Description of Artificial Sequence: Synthetic oligonucleotide

SEQ ID NO: 10412 - DNA, 24 bp, Artificial Sequence
  Description of Artificial Sequence: Synthetic probe
aatgcagcaccagatcagccccag

SEQ ID NO: 10413 - DNA, 19 bp, Artificial Sequence
  Description of Artificial Sequence: Synthetic primer
ttgctgtgcgcggtagaac

SEQ ID NO: 10414 - DNA, 20 bp, Artificial Sequence
  Description of Artificial Sequence: Synthetic primer
tggcaccagcttagcgtaac

SEQ ID NO: 10415 - DNA, 43 bp, Artificial Sequence; identical to SEQ ID NO: 1585
  Description of Artificial Sequence: Synthetic primer
  Description of Combined DNA/RNA Molecule: Synthetic primer

SEQ ID NO: 10416 - DNA, 39 bp, Artificial Sequence; identical to SEQ ID NO: 1604
  Description of Artificial Sequence: Synthetic primer
  Description of Combined DNA/RNA Molecule: Synthetic primer

SEQ ID NO: 10417 - DNA, 39 bp, Artificial Sequence; identical to SEQ ID NO: 1605
  Description of Artificial Sequence: Synthetic primer
  Description of Combined DNA/RNA Molecule: Synthetic primer

SEQ ID NO: 10418 - DNA, 48 bp, Artificial Sequence; identical to SEQ ID NO: 1606
  Description of Artificial Sequence: Synthetic primer
  Description of Combined DNA/RNA Molecule: Synthetic primer

SEQ ID NO: 10419 - DNA, 47 bp, Artificial Sequence; identical to SEQ ID NO: 1607
  Description of Artificial Sequence: Synthetic oligonucleotide
  Description of Combined DNA/RNA Molecule: Synthetic oligonucleotide

SEQ ID NO: 10420 - DNA, 46 bp, Artificial Sequence; identical to SEQ ID NO: 1608
  Description of Artificial Sequence: Synthetic oligonucleotide

SEQ ID NO: 10421 - DNA, 28 bp, Artificial Sequence
  Description of Artificial Sequence: Synthetic probe
aattcctcatccctccacacacaccctg

SEQ ID NO: 10422 - DNA, 21 bp, Artificial Sequence
  Description of Artificial Sequence: Synthetic primer
tcacagagacttgccgatcac

SEQ ID NO: 10423 - DNA, 22 bp, Artificial Sequence
  Description of Artificial Sequence: Synthetic primer
tggccatgtctaagctacacac

SEQ ID NO: 10424 - DNA, 46 bp, Artificial Sequence; identical to SEQ ID NO: 1612
  Description of Artificial Sequence: Synthetic primer
  Description of Combined DNA/RNA Molecule: Synthetic primer

SEQ ID NO: 10425 - DNA, 45 bp, Artificial Sequence; identical to SEQ ID NO: 1629
  Description of Artificial Sequence: Synthetic primer
  Description of Combined DNA/RNA Molecule: Synthetic primer

SEQ ID NO: 10426 - DNA, 41 bp, Artificial Sequence; identical to SEQ ID NO: 1630
  Description of Artificial Sequence: Synthetic primer
  Description of Combined DNA/RNA Molecule: Synthetic primer

SEQ ID NO: 10427 - DNA, 53 bp, Artificial Sequence; identical to SEQ ID NO: 1631
  Description of Artificial Sequence: Synthetic primer
  Description of Combined DNA/RNA Molecule: Synthetic primer

SEQ ID NO: 10428 - DNA, 53 bp, Artificial Sequence; identical to SEQ ID NO: 1632
  Description of Artificial Sequence: Synthetic oligonucleotide
  Description of Combined DNA/RNA Molecule: Synthetic oligonucleotide

SEQ ID NO: 10429 - DNA, 47 bp, Artificial Sequence; identical to SEQ ID NO: 1633
  Description of Artificial Sequence: Synthetic oligonucleotide

SEQ ID NO: 10430 - DNA, 21 bp, Artificial Sequence
  Description of Artificial Sequence: Synthetic probe
tttggcccaggctcacccctg

SEQ ID NO: 10431 - DNA, 22 bp, Artificial Sequence
  Description of Artificial Sequence: Synthetic primer
tgatgctggcaaaccctagaac

SEQ ID NO: 10432 - DNA, 20 bp, Artificial Sequence
  Description of Artificial Sequence: Synthetic primer
tggcctaacggtgatggaac

SEQ ID NO: 10433 - DNA, 51 bp, Artificial Sequence; identical to SEQ ID NO: 1637
  Description of Artificial Sequence: Synthetic primer
  Description of Combined DNA/RNA Molecule: Synthetic primer

SEQ ID NO: 10434 - DNA, 39 bp, Artificial Sequence; identical to SEQ ID NO: 1638
  Description of Artificial Sequence: Synthetic primer
  Description of Combined DNA/RNA Molecule: Synthetic primer

SEQ ID NO: 10435 - DNA, 37 bp, Artificial Sequence; identical to SEQ ID NO: 1639
  Description of Artificial Sequence: Synthetic primer
  Description of Combined DNA/RNA Molecule: Synthetic primer

SEQ ID NO: 10436 - DNA, 54 bp, Artificial Sequence; identical to SEQ ID NO: 1640
  Description of Artificial Sequence: Synthetic primer
  Description of Combined DNA/RNA Molecule: Synthetic primer

SEQ ID NO: 10437 - DNA, 42 bp, Artificial Sequence; identical to SEQ ID NO: 1641
  Description of Artificial Sequence: Synthetic oligonucleotide
  Description of Combined DNA/RNA Molecule: Synthetic oligonucleotide

SEQ ID NO: 10438 - DNA, 47 bp, Artificial Sequence; identical to SEQ ID NO: 1642
  Description of Artificial Sequence: Synthetic oligonucleotide

SEQ ID NO: 10439 - DNA, 29 bp, Artificial Sequence
  Description of Artificial Sequence: Synthetic probe
ttgctgacaaacagcagggttgtggttga

SEQ ID NO: 10440 - DNA, 19 bp, Artificial Sequence
  Description of Artificial Sequence: Synthetic primer
ttttcggcatccgcttcca

SEQ ID NO: 10441 - DNA, 21 bp, Artificial Sequence
  Description of Artificial Sequence: Synthetic primer
tggcctgtcctctgttaacca

SEQ ID NO: 10442 - DNA, 48 bp, Artificial Sequence; identical to SEQ ID NO: 1646
  Description of Artificial Sequence: Synthetic primer
  Description of Combined DNA/RNA Molecule: Synthetic primer

SEQ ID NO: 10443 - DNA, 42 bp, Artificial Sequence; identical to SEQ ID NO: 1862
  Description of Artificial Sequence: Synthetic primer
  Description of Combined DNA/RNA Molecule: Synthetic primer

SEQ ID NO: 10444 - DNA, 43 bp, Artificial Sequence; identical to SEQ ID NO: 1863
  Description of Artificial Sequence: Synthetic primer
  Description of Combined DNA/RNA Molecule: Synthetic primer

SEQ ID NO: 10445 - DNA, 52 bp, Artificial Sequence; identical to SEQ ID NO: 1864
  Description of Artificial Sequence: Synthetic primer
  Description of Combined DNA/RNA Molecule: Synthetic primer

SEQ ID NO: 10446 - DNA, 45 bp, Artificial Sequence; identical to SEQ ID NO: 1865
  Description of Artificial Sequence: Synthetic oligonucleotide
  Description of Combined DNA/RNA Molecule: Synthetic oligonucleotide

SEQ ID NO: 10447 - DNA, 51 bp, Artificial Sequence; identical to SEQ ID NO: 1866
  Description of Artificial Sequence: Synthetic oligonucleotide

SEQ ID NO: 10448 - DNA, 29 bp, Artificial Sequence
  Description of Artificial Sequence: Synthetic probe
ttccactcagccctgcatttgtctgaagc

SEQ ID NO: 10449 - DNA, 20 bp, Artificial Sequence
  Description of Artificial Sequence: Synthetic primer
tttttacgcacagcaccacc

SEQ ID NO: 10450 - DNA, 22 bp, Artificial Sequence
  Description of Artificial Sequence: Synthetic primer
tgtctaagccgcctatgtaacc

SEQ ID NO: 10451 - DNA, 51 bp, Artificial Sequence; identical to SEQ ID NO: 1870
  Description of Artificial Sequence: Synthetic primer
  Description of Combined DNA/RNA Molecule: Synthetic primer

SEQ ID NO: 10452 - DNA, 39 bp, Artificial Sequence; identical to SEQ ID NO: 1880
  Description of Artificial Sequence: Synthetic primer
  Description of Combined DNA/RNA Molecule: Synthetic primer

SEQ ID NO: 10453 - DNA, 40 bp, Artificial Sequence; identical to SEQ ID NO: 1881
  Description of Artificial Sequence: Synthetic primer
  Description of Combined DNA/RNA Molecule: Synthetic primer

SEQ ID NO: 10454 - DNA, 48 bp, Artificial Sequence; identical to SEQ ID NO: 1882
  Description of Artificial Sequence: Synthetic primer
  Description of Combined DNA/RNA Molecule: Synthetic primer

SEQ ID NO: 10455 - DNA, 44 bp, Artificial Sequence; identical to SEQ ID NO: 1883
  Description of Artificial Sequence: Synthetic oligonucleotide
  Description of Combined DNA/RNA Molecule: Synthetic oligonucleotide

SEQ ID NO: 10456 - DNA, 45 bp, Artificial Sequence; identical to SEQ ID NO: 1884
  Description of Artificial Sequence: Synthetic oligonucleotide

SEQ ID NO: 10457 - DNA, 22 bp, Artificial Sequence
  Description of Artificial Sequence: Synthetic probe
ttcagcgcagccacaccacagc

SEQ ID NO: 10458 - DNA, 21 bp, Artificial Sequence
  Description of Artificial Sequence: Synthetic primer
tggaggccggagaaattaaac

SEQ ID NO: 10459 - DNA, 21 bp, Artificial Sequence
  Description of Artificial Sequence: Synthetic primer
tgtgatgcccagatcccaaac

SEQ ID NO: 10460 - DNA, 51 bp, Artificial Sequence; identical to SEQ ID NO: 1888
  Description of Artificial Sequence: Synthetic primer
  Description of Combined DNA/RNA Molecule: Synthetic primer

SEQ ID NO: 10461 - DNA, 40 bp, Artificial Sequence; identical to SEQ ID NO: 1898
  Description of Artificial Sequence: Synthetic primer
  Description of Combined DNA/RNA Molecule: Synthetic primer

SEQ ID NO: 10462 - DNA, 39 bp, Artificial Sequence; identical to SEQ ID NO: 1899
  Description of Artificial Sequence: Synthetic primer
  Description of Combined DNA/RNA Molecule: Synthetic primer

SEQ ID NO: 10463 - DNA, 49 bp, Artificial Sequence; identical to SEQ ID NO: 1900
  Description of Artificial Sequence: Synthetic primer
  Description of Combined DNA/RNA Molecule: Synthetic primer

SEQ ID NO: 10464 - DNA, 44 bp, Artificial Sequence; identical to SEQ ID NO: 1901
  Description of Artificial Sequence: Synthetic oligonucleotide
  Description of Combined DNA/RNA Molecule: Synthetic oligonucleotide

SEQ ID NO: 10465 - DNA, 45 bp, Artificial Sequence; identical to SEQ ID NO: 1902
  Description of Artificial Sequence: Synthetic oligonucleotide

SEQ ID NO: 10466 - DNA, 26 bp, Artificial Sequence
  Description of Artificial Sequence: Synthetic probe
ttctggacaagtgacagccccagctc

SEQ ID NO: 10467 - DNA, 22 bp, Artificial Sequence
  Description of Artificial Sequence: Synthetic primer
tggataaactaagtccgcccac

SEQ ID NO: 10468 - DNA, 21 bp, Artificial Sequence
  Description of Artificial Sequence: Synthetic primer
tgttagacgtcgctcagtcac

SEQ ID NO: 10469 - DNA, 46 bp, Artificial Sequence; identical to SEQ ID NO: 1906
  Description of Artificial Sequence: Synthetic primer
  Description of Combined DNA/RNA Molecule: Synthetic primer

SEQ ID NO: 10470 - DNA, 43 bp, Artificial Sequence; identical to SEQ ID NO: 4804
  Description of Artificial Sequence: Synthetic primer
  Description of Combined DNA/RNA Molecule: Synthetic primer

SEQ ID NO: 10471 - DNA, 45 bp, Artificial Sequence; identical to SEQ ID NO: 4805
  Description of Artificial Sequence: Synthetic primer
  Description of Combined DNA/RNA Molecule: Synthetic primer

SEQ ID NO: 10472 - DNA, 58 bp, Artificial Sequence; identical to SEQ ID NO: 4806
  Description of Artificial Sequence: Synthetic primer
  Description of Combined DNA/RNA Molecule: Synthetic primer

SEQ ID NO: 10473 - DNA, 53 bp, Artificial Sequence; identical to SEQ ID NO: 4807
  Description of Artificial Sequence: Synthetic oligonucleotide
  Description of Combined DNA/RNA Molecule: Synthetic oligonucleotide

SEQ ID NO: 10474 - DNA, 50 bp, Artificial Sequence; identical to SEQ ID NO: 4808
  Description of Artificial Sequence: Synthetic oligonucleotide

SEQ ID NO: 10475 - DNA, 31 bp, Artificial Sequence; identical to SEQ ID NO: 4809
  Description of Artificial Sequence: Synthetic probe

SEQ ID NO: 10476 - DNA, 19 bp, Artificial Sequence
  Description of Artificial Sequence: Synthetic primer
ttcgtccctgcacgctaac

SEQ ID NO: 10477 - DNA, 20 bp, Artificial Sequence
  Description of Artificial Sequence: Synthetic primer
tggcctaacggtgatggaac

SEQ ID NO: 10478 - DNA, 47 bp, Artificial Sequence; identical to SEQ ID NO: 4812
  Description of Artificial Sequence: Synthetic primer
  Description of Combined DNA/RNA Molecule: Synthetic primer

SEQ ID NO: 10479 - DNA, 41 bp, Artificial Sequence; identical to SEQ ID NO: 4813
  Description of Artificial Sequence: Synthetic primer
  Description of Combined DNA/RNA Molecule: Synthetic primer

SEQ ID NO: 10480 - DNA, 40 bp, Artificial Sequence; identical to SEQ ID NO: 4814
  Description of Artificial Sequence: Synthetic primer
  Description of Combined DNA/RNA Molecule: Synthetic primer

SEQ ID NO: 10481 - DNA, 50 bp, Artificial Sequence; identical to SEQ ID NO: 4815
  Description of Artificial Sequence: Synthetic primer
  Description of Combined DNA/RNA Molecule: Synthetic primer

SEQ ID NO: 10482 - DNA, 57 bp, Artificial Sequence; identical to SEQ ID NO: 4816
  Description of Artificial Sequence: Synthetic oligonucleotide
  Description of Combined DNA/RNA Molecule: Synthetic oligonucleotide

SEQ ID NO: 10483 - DNA, 51 bp, Artificial Sequence; identical to SEQ ID NO: 4817
  Description of Artificial Sequence: Synthetic oligonucleotide

SEQ ID NO: 10484 - DNA, 32 bp, Artificial Sequence; identical to SEQ ID NO: 4818
  Description of Artificial Sequence: Synthetic probe

SEQ ID NO: 10485 - DNA, 22 bp, Artificial Sequence
  Description of Artificial Sequence: Synthetic primer
tgatgctggcaaaccctagaac

SEQ ID NO: 10486 - DNA, 20 bp, Artificial Sequence
  Description of Artificial Sequence: Synthetic primer
tggcctaacggtgatggaac

SEQ ID NO: 10487 - DNA, 48 bp, Artificial Sequence; identical to SEQ ID NO: 4821
  Description of Artificial Sequence: Synthetic primer
  Description of Combined DNA/RNA Molecule: Synthetic primer

SEQ ID NO: 10488 - DNA, 38 bp, Artificial Sequence; identical to SEQ ID NO: 5172
  Description of Artificial Sequence: Synthetic primer
  Description of Combined DNA/RNA Molecule: Synthetic primer

SEQ ID NO: 10489 - DNA, 37 bp, Artificial Sequence; identical to SEQ ID NO: 5173
  Description of Artificial Sequence: Synthetic primer
  Description of Combined DNA/RNA Molecule: Synthetic primer

SEQ ID NO: 10490 - DNA, 47 bp, Artificial Sequence; identical to SEQ ID NO: 5174
  Description of Artificial Sequence: Synthetic primer
  Description of Combined DNA/RNA Molecule: Synthetic primer

SEQ ID NO: 10491 - DNA, 46 bp, Artificial Sequence; identical to SEQ ID NO: 5175
  Description of Artificial Sequence: Synthetic oligonucleotide
  Description of Combined DNA/RNA Molecule: Synthetic oligonucleotide

SEQ ID NO: 10492 - DNA, 49 bp, Artificial Sequence; identical to SEQ ID NO: 5176
  Description of Artificial Sequence: Synthetic oligonucleotide

SEQ ID NO: 10493 - DNA, 22 bp, Artificial Sequence
  Description of Artificial Sequence: Synthetic probe
tttggcgcagagcacacagctg

SEQ ID NO: 10494 - DNA, 20 bp, Artificial Sequence
  Description of Artificial Sequence: Synthetic primer
tatggactgtaccagcccaa

SEQ ID NO: 10495 - DNA, 21 bp, Artificial Sequence
  Description of Artificial Sequence: Synthetic primer
tgaacaccgcctcagtttcaa

SEQ ID NO: 10496 - DNA, 48 bp, Artificial Sequence; identical to SEQ ID NO: 5180
  Description of Artificial Sequence: Synthetic primer
  Description of Combined DNA/RNA Molecule: Synthetic primer

SEQ ID NO: 10497 - DNA, 38 bp, Artificial Sequence; identical to SEQ ID NO: 5181
  Description of Artificial Sequence: Synthetic primer
  Description of Combined DNA/RNA Molecule: Synthetic primer

SEQ ID NO: 10498 - DNA, 42 bp, Artificial Sequence; identical to SEQ ID NO: 5182
  Description of Artificial Sequence: Synthetic primer
  Description of Combined DNA/RNA Molecule: Synthetic primer

SEQ ID NO: 10499 - DNA, 53 bp, Artificial Sequence; identical to SEQ ID NO: 5183
  Description of Artificial Sequence: Synthetic primer
  Description of Combined DNA/RNA Molecule: Synthetic primer

SEQ ID NO: 10500 - DNA, 45 bp, Artificial Sequence; identical to SEQ ID NO: 5184
  Description of Artificial Sequence: Synthetic oligonucleotide
  Description of Combined DNA/RNA Molecule: Synthetic oligonucleotide

SEQ ID NO: 10501 - DNA, 49 bp, Artificial Sequence; identical to SEQ ID NO: 5185
  Description of Artificial Sequence: Synthetic oligonucleotide

SEQ ID NO: 10502 - DNA, 28 bp, Artificial Sequence
  Description of Artificial Sequence: Synthetic probe
ttcagcccagtcccattatcccaagcac

SEQ ID NO: 10503 - DNA, 20 bp, Artificial Sequence
  Description of Artificial Sequence: Synthetic primer
tttgcctcttgtaggtgcca

SEQ ID NO: 10504 - DNA, 19 bp, Artificial Sequence
  Description of Artificial Sequence: Synthetic primer
tgaatatccgcgttgccca

SEQ ID NO: 10505 - DNA, 49 bp, Artificial Sequence; identical to SEQ ID NO: 5189
  Description of Artificial Sequence: Synthetic primer
  Description of Combined DNA/RNA Molecule: Synthetic primer

SEQ ID NO: 10506 - DNA, 38 bp, Artificial Sequence; identical to SEQ ID NO: 5190
  Description of Artificial Sequence: Synthetic primer
  Description of Combined DNA/RNA Molecule: Synthetic primer

SEQ ID NO: 10507 - DNA, 40 bp, Artificial Sequence; identical to SEQ ID NO: 5191
  Description of Artificial Sequence: Synthetic primer
  Description of Combined DNA/RNA Molecule: Synthetic primer

SEQ ID NO: 10508 - DNA, 54 bp, Artificial Sequence; identical to SEQ ID NO: 5192
  Description of Artificial Sequence: Synthetic primer
  Description of Combined DNA/RNA Molecule: Synthetic primer

SEQ ID NO: 10509 - DNA, 45 bp, Artificial Sequence; identical to SEQ ID NO: 5193
  Description of Artificial Sequence: Synthetic oligonucleotide
  Description of Combined DNA/RNA Molecule: Synthetic oligonucleotide

SEQ ID NO: 10510 - DNA, 42 bp, Artificial Sequence; identical to SEQ ID NO: 5194
  Description of Artificial Sequence: Synthetic oligonucleotide

SEQ ID NO: 10511 - DNA, 23 bp, Artificial Sequence
  Description of Artificial Sequence: Synthetic probe
ttcaagacaggaggagccagggc

SEQ ID NO: 10512 - DNA, 21 bp, Artificial Sequence
  Description of Artificial Sequence: Synthetic primer
tgtcgcccggtagcaataaac

SEQ ID NO: 10513 - DNA, 22 bp, Artificial Sequence
  Description of Artificial Sequence: Synthetic primer
tgaatgcaaagatcgcggaaac

SEQ ID NO: 10514 - DNA, 43 bp, Artificial Sequence; identical to SEQ ID NO: 5198
  Description of Artificial Sequence: Synthetic primer
  Description of Combined DNA/RNA Molecule: Synthetic primer

SEQ ID NO: 10515 - DNA, 37 bp, Artificial Sequence; identical to SEQ ID NO: 5199
  Description of Artificial Sequence: Synthetic primer
  Description of Combined DNA/RNA Molecule: Synthetic primer

SEQ ID NO: 10516 - DNA, 38 bp, Artificial Sequence; identical to SEQ ID NO: 5200
  Description of Artificial Sequence: Synthetic primer
  Description of Combined DNA/RNA Molecule: Synthetic primer

SEQ ID NO: 10517 - DNA, 54 bp, Artificial Sequence; identical to SEQ ID NO: 5201
  Description of Artificial Sequence: Synthetic primer
  Description of Combined DNA/RNA Molecule: Synthetic primer

SEQ ID NO: 10518 - DNA, 46 bp, Artificial Sequence; identical to SEQ ID NO: 5202
  Description of Artificial Sequence: Synthetic oligonucleotide
  Description of Combined DNA/RNA Molecule: Synthetic oligonucleotide

SEQ ID NO: 10519 - DNA, 55 bp, Artificial Sequence; identical to SEQ ID NO: 5203
  Description of Artificial Sequence: Synthetic oligonucleotide

SEQ ID NO: 10520 - DNA, 31 bp, Artificial Sequence; identical to SEQ ID NO: 5204
  Description of Artificial Sequence: Synthetic probe

SEQ ID NO: 10521 - DNA, 22 bp, Artificial Sequence
  Description of Artificial Sequence: Synthetic primer
tgtgcactagtccacgtgaaac

SEQ ID NO: 10522 - DNA, 22 bp, Artificial Sequence
  Description of Artificial Sequence: Synthetic primer
tgaatgcaaagatcgcggaaac

SEQ ID NO: 10523 - DNA, 52 bp, Artificial Sequence; identical to SEQ ID NO: 5207
  Description of Artificial Sequence: Synthetic primer
  Description of Combined DNA/RNA Molecule: Synthetic primer

SEQ ID NO: 10524 - DNA, 37 bp, Artificial Sequence; identical to SEQ ID NO: 5208
  Description of Artificial Sequence: Synthetic primer
  Description of Combined DNA/RNA Molecule: Synthetic primer

SEQ ID NO: 10525 - DNA, 41 bp, Artificial Sequence; identical to SEQ ID NO: 5209
  Description of Artificial Sequence: Synthetic primer
  Description of Combined DNA/RNA Molecule: Synthetic primer

SEQ ID NO: 10526 - DNA, 51 bp, Artificial Sequence; identical to SEQ ID NO: 5210
  Description of Artificial Sequence: Synthetic primer
  Description of Combined DNA/RNA Molecule: Synthetic primer

SEQ ID NO: 10527 - DNA, 46 bp, Artificial Sequence; identical to SEQ ID NO: 5211
  Description of Artificial Sequence: Synthetic oligonucleotide
  Description of Combined DNA/RNA Molecule: Synthetic oligonucleotide

SEQ ID NO: 10528 - DNA, 41 bp, Artificial Sequence; identical to SEQ ID NO: 5212
  Description of Artificial Sequence: Synthetic oligonucleotide

SEQ ID NO: 10529 - DNA, 22 bp, Artificial Sequence
  Description of Artificial Sequence: Synthetic probe
ttaccatcacccccaccaccca

SEQ ID NO: 10530 - DNA, 22 bp, Artificial Sequence
  Description of Artificial Sequence: Synthetic primer
tacagatacggacgggaatcaa

SEQ ID NO: 10531 - DNA, 22 bp, Artificial Sequence
  Description of Artificial Sequence: Synthetic primer
tgacgcaggaggatgtaaacaa

SEQ ID NO: 10532 - DNA, 49 bp, Artificial Sequence; identical to SEQ ID NO: 5216
  Description of Artificial Sequence: Synthetic primer
  Description of Combined DNA/RNA Molecule: Synthetic primer

SEQ ID NO: 10533 - DNA, 38 bp, Artificial Sequence; identical to SEQ ID NO: 5217
  Description of Artificial Sequence: Synthetic primer
  Description of Combined DNA/RNA Molecule: Synthetic primer

SEQ ID NO: 10534 - DNA, 39 bp, Artificial Sequence; identical to SEQ ID NO: 5218
  Description of Artificial Sequence: Synthetic primer
  Description of Combined DNA/RNA Molecule: Synthetic primer

SEQ ID NO: 10535 - DNA, 51 bp, Artificial Sequence; identical to SEQ ID NO: 5219
  Description of Artificial Sequence: Synthetic primer
  Description of Combined DNA/RNA Molecule: Synthetic primer

SEQ ID NO: 10536 - DNA, 49 bp, Artificial Sequence; identical to SEQ ID NO: 5220
  Description of Artificial Sequence: Synthetic oligonucleotide
  Description of Combined DNA/RNA Molecule: Synthetic oligonucleotide

SEQ ID NO: 10537 - DNA, 45 bp, Artificial Sequence; identical to SEQ ID NO: 5221
  Description of Artificial Sequence: Synthetic oligonucleotide

SEQ ID NO: 10538 - DNA, 28 bp, Artificial Sequence
  Description of Artificial Sequence: Synthetic probe
ttcacttcatagctgcaggcaccaccac

SEQ ID NO: 10539 - DNA, 19 bp, Artificial Sequence
  Description of Artificial Sequence: Synthetic primer
ttggcgcaacggtttccaa

SEQ ID NO: 10540 - DNA, 22 bp, Artificial Sequence
  Description of Artificial Sequence: Synthetic primer
tgacgcaggaggatgtaaacaa

SEQ ID NO: 10541 - DNA, 53 bp, Artificial Sequence; identical to SEQ ID NO: 5225
  Description of Artificial Sequence: Synthetic primer
  Description of Combined DNA/RNA Molecule: Synthetic primer

SEQ ID NO: 10542 - DNA, 45 bp, Artificial Sequence; identical to SEQ ID NO: 363
  Description of Artificial Sequence: Synthetic primer
  Description of Combined DNA/RNA Molecule: Synthetic primer

SEQ ID NO: 10543 - DNA, 48 bp, Artificial Sequence; identical to SEQ ID NO: 5227
  Description of Artificial Sequence: Synthetic primer
  Description of Combined DNA/RNA Molecule: Synthetic primer

SEQ ID NO: 10544 - DNA, 51 bp, Artificial Sequence; identical to SEQ ID NO: 5228
  Description of Artificial Sequence: Synthetic oligonucleotide
  Description of Combined DNA/RNA Molecule: Synthetic oligonucleotide

SEQ ID NO: 10545 - DNA, 50 bp, Artificial Sequence; identical to SEQ ID NO: 5229
  Description of Artificial Sequence: Synthetic oligonucleotide

SEQ ID NO: 10546 - DNA, 31 bp, Artificial Sequence; identical to SEQ ID NO: 5230
  Description of Artificial Sequence: Synthetic probe

SEQ ID NO: 10547 - DNA, 19 bp, Artificial Sequence
  Description of Artificial Sequence: Synthetic primer
ttcagcagcctggcatcac

SEQ ID NO: 10548 - DNA, 19 bp, Artificial Sequence
  Description of Artificial Sequence: Synthetic primer
tgcaaccttagcgctccac

SEQ ID NO: 10549 - DNA, 43 bp, Artificial Sequence; identical to SEQ ID NO: 5233
  Description of Artificial Sequence: Synthetic primer
  Description of Combined DNA/RNA Molecule: Synthetic primer

SEQ ID NO: 10550 - DNA, 40 bp, Artificial Sequence; identical to SEQ ID NO: 5234
  Description of Artificial Sequence: Synthetic primer
  Description of Combined DNA/RNA Molecule: Synthetic primer

SEQ ID NO: 10551 - DNA, 39 bp, Artificial Sequence; identical to SEQ ID NO: 5235
  Description of Artificial Sequence: Synthetic primer
  Description of Combined DNA/RNA Molecule: Synthetic primer

SEQ ID NO: 10552 - DNA, 53 bp, Artificial Sequence; identical to SEQ ID NO: 5236
  Description of Artificial Sequence: Synthetic primer
  Description of Combined DNA/RNA Molecule: Synthetic primer

SEQ ID NO: 10553 - DNA, 46 bp, Artificial Sequence; identical to SEQ ID NO: 5237
  Description of Artificial Sequence: Synthetic oligonucleotide
  Description of Combined DNA/RNA Molecule: Synthetic oligonucleotide

SEQ ID NO: 10554 - DNA, 46 bp, Artificial Sequence; identical to SEQ ID NO: 5238
  Description of Artificial Sequence: Synthetic oligonucleotide

SEQ ID NO: 10555 - DNA, 28 bp, Artificial Sequence
  Description of Artificial Sequence: Synthetic probe
ttggcatcagggacccacactgagagtc

SEQ ID NO: 10556 - DNA, 19 bp, Artificial Sequence
  Description of Artificial Sequence: Synthetic primer
ttgttcgcccgttggtcac

SEQ ID NO: 10557 - DNA, 19 bp, Artificial Sequence
  Description of Artificial Sequence: Synthetic primer
tgcaaccttagcgctccac

SEQ ID NO: 10558 - DNA, 47 bp, Artificial Sequence; identical to SEQ ID NO: 5242
  Description of Artificial Sequence: Synthetic primer
  Description of Combined DNA/RNA Molecule: Synthetic primer

SEQ ID NO: 10559 - DNA, 37 bp, Artificial Sequence; identical to SEQ ID NO: 5243
  Description of Artificial Sequence: Synthetic primer
  Description of Combined DNA/RNA Molecule: Synthetic primer

SEQ ID NO: 10560 - DNA, 38 bp, Artificial Sequence; identical to SEQ ID NO: 5244
  Description of Artificial Sequence: Synthetic primer
  Description of Combined DNA/RNA Molecule: Synthetic primer

SEQ ID NO: 10561 - DNA, 53 bp, Artificial Sequence; identical to SEQ ID NO: 5245
  Description of Artificial Sequence: Synthetic primer
  Description of Combined DNA/RNA Molecule: Synthetic primer

SEQ ID NO: 10562 - DNA, 46 bp, Artificial Sequence; identical to SEQ ID NO: 5246
  Description of Artificial Sequence: Synthetic oligonucleotide
  Description of Combined DNA/RNA Molecule: Synthetic oligonucleotide

SEQ ID NO: 10563 - DNA, 43 bp, Artificial Sequence; identical to SEQ ID NO: 5247
  Description of Artificial Sequence: Synthetic oligonucleotide

SEQ ID NO: 10564 - DNA, 23 bp, Artificial Sequence
  Description of Artificial Sequence: Synthetic probe
ttctgaacaggtggagctgcagc

SEQ ID NO: 10565 - DNA, 22 bp, Artificial Sequence
  Description of Artificial Sequence: Synthetic primer
tatcgcatcaaatggagagcaa

SEQ ID NO: 10566 - DNA, 22 bp, Artificial Sequence
  Description of Artificial Sequence: Synthetic primer
tgcaacgtataacagcggtcaa

SEQ ID NO: 10567 - DNA, 50 bp, Artificial Sequence; identical to SEQ ID NO: 5251
  Description of Artificial Sequence: Synthetic primer
  Description of Combined DNA/RNA Molecule: Synthetic primer

SEQ ID NO: 10568 - DNA, 37 bp, Artificial Sequence; identical to SEQ ID NO: 5252
  Description of Artificial Sequence: Synthetic primer
  Description of Combined DNA/RNA Molecule: Synthetic primer

SEQ ID NO: 10569 - DNA, 37 bp, Artificial Sequence; identical to SEQ ID NO: 5253
  Description of Artificial Sequence: Synthetic primer
  Description of Combined DNA/RNA Molecule: Synthetic primer

SEQ ID NO: 10570 - DNA, 50 bp, Artificial Sequence; identical to SEQ ID NO: 5254
  Description of Artificial Sequence: Synthetic primer
  Description of Combined DNA/RNA Molecule: Synthetic primer

SEQ ID NO: 10571 - DNA, 50 bp, Artificial Sequence; identical to SEQ ID NO: 5255
  Description of Artificial Sequence: Synthetic oligonucleotide
  Description of Combined DNA/RNA Molecule: Synthetic oligonucleotide

SEQ ID NO: 10572 - DNA, 46 bp, Artificial Sequence; identical to SEQ ID NO: 5256
  Description of Artificial Sequence: Synthetic oligonucleotide

SEQ ID NO: 10573 - DNA, 25 bp, Artificial Sequence
  Description of Artificial Sequence: Synthetic probe
ttgccatcaccaccacagccacctt

SEQ ID NO: 10574 - DNA, 22 bp, Artificial Sequence
  Description of Artificial Sequence: Synthetic primer
tcctagtacctacagtgggcaa

SEQ ID NO: 10575 - DNA, 22 bp, Artificial Sequence
  Description of Artificial Sequence: Synthetic primer
tgcaacgtataacagcggtcaa

SEQ ID NO: 10576 - DNA, 45 bp, Artificial Sequence; identical to SEQ ID NO: 5260
  Description of Artificial Sequence: Synthetic primer
  Description of Combined DNA/RNA Molecule: Synthetic primer

SEQ ID NO: 10577 - DNA, 39 bp, Artificial Sequence; identical to SEQ ID NO: 5270
  Description of Artificial Sequence: Synthetic primer
  Description of Combined DNA/RNA Molecule: Synthetic primer

SEQ ID NO: 10578 - DNA, 37 bp, Artificial Sequence; identical to SEQ ID NO: 5271
  Description of Artificial Sequence: Synthetic primer
  Description of Combined DNA/RNA Molecule: Synthetic primer

SEQ ID NO: 10579 - DNA, 55 bp, Artificial Sequence; identical to SEQ ID NO: 5272
  Description of Artificial Sequence: Synthetic primer
  Description of Combined DNA/RNA Molecule: Synthetic primer

SEQ ID NO: 10580 - DNA, 49 bp, Artificial Sequence; identical to SEQ ID NO: 5273
  Description of Artificial Sequence: Synthetic oligonucleotide
  Description of Combined DNA/RNA Molecule: Synthetic oligonucleotide

SEQ ID NO: 10581 - DNA, 48 bp, Artificial Sequence; identical to SEQ ID NO: 5274
  Description of Artificial Sequence: Synthetic oligonucleotide

SEQ ID NO: 10582 - DNA, 26 bp, Artificial Sequence
  Description of Artificial Sequence: Synthetic probe
tttggcgcacacaacttccaggacag

SEQ ID NO: 10583 - DNA, 20 bp, Artificial Sequence
  Description of Artificial Sequence: Synthetic primer
ttcttcacagtaccgccaca

SEQ ID NO: 10584 - DNA, 19 bp, Artificial Sequence
  Description of Artificial Sequence: Synthetic primer
tgcaccaccagacaacaca

SEQ ID NO: 10585 - DNA, 45 bp, Artificial Sequence; identical to SEQ ID NO: 5278
  Description of Artificial Sequence: Synthetic primer
  Description of Combined DNA/RNA Molecule: Synthetic primer

SEQ ID NO: 10586 - DNA, 48 bp, Artificial Sequence; identical to SEQ ID NO: 5288
  Description of Artificial Sequence: Synthetic primer
  Description of Combined DNA/RNA Molecule: Synthetic primer

SEQ ID NO: 10587 - DNA, 46 bp, Artificial Sequence; identical to SEQ ID NO: 5289
  Description of Artificial Sequence: Synthetic primer
  Description of Combined DNA/RNA Molecule: Synthetic primer

SEQ ID NO: 10588 - DNA, 52 bp, Artificial Sequence; identical to SEQ ID NO: 5290
  Description of Artificial Sequence: Synthetic primer
  Description of Combined DNA/RNA Molecule: Synthetic primer

SEQ ID NO: 10589 - DNA, 47 bp, Artificial Sequence; identical to SEQ ID NO: 5291
  Description of Artificial Sequence: Synthetic oligonucleotide
  Description of Combined DNA/RNA Molecule: Synthetic oligonucleotide

SEQ ID NO: 10590 - DNA, 50 bp, Artificial Sequence; identical to SEQ ID NO: 5292
  Description of Artificial Sequence: Synthetic oligonucleotide

SEQ ID NO: 10591 - DNA, 29 bp, Artificial Sequence
  Description of Artificial Sequence: Synthetic probe
aactcttcagcaggtagcacaccttgtcc

SEQ ID NO: 10592 - DNA, 21 bp, Artificial Sequence
  Description of Artificial Sequence: Synthetic primer
tcatcgccctcagatcttcca

SEQ ID NO: 10593 - DNA, 21 bp, Artificial Sequence
  Description of Artificial Sequence: Synthetic primer
tgccctccaatctatcctcca

SEQ ID NO: 10594 - DNA, 47 bp, Artificial Sequence; identical to SEQ ID NO: 5296
  Description of Artificial Sequence: Synthetic primer
  Description of Combined DNA/RNA Molecule: Synthetic primer

SEQ ID NO: 10595 - DNA, 37 bp, Artificial Sequence; identical to SEQ ID NO: 5333
  Description of Artificial Sequence: Synthetic primer
  Description of Combined DNA/RNA Molecule: Synthetic primer

SEQ ID NO: 10596 - DNA, 41 bp, Artificial Sequence; identical to SEQ ID NO: 5334
  Description of Artificial Sequence: Synthetic primer
  Description of Combined DNA/RNA Molecule: Synthetic primer

SEQ ID NO: 10597 - DNA, 50 bp, Artificial Sequence; identical to SEQ ID NO: 5335
  Description of Artificial Sequence: Synthetic primer
  Description of Combined DNA/RNA Molecule: Synthetic primer

SEQ ID NO: 10598 - DNA, 44 bp, Artificial Sequence; identical to SEQ ID NO: 5336
  Description of Artificial Sequence: Synthetic oligonucleotide
  Description of Combined DNA/RNA Molecule: Synthetic oligonucleotide

SEQ ID NO: 10599 - DNA, 42 bp, Artificial Sequence; identical to SEQ ID NO: 5337
  Description of Artificial Sequence: Synthetic oligonucleotide

SEQ ID NO: 10600 - DNA, 27 bp, Artificial Sequence
  Description of Artificial Sequence: Synthetic probe
ttaatctcagaggcccacagccagtca

SEQ ID NO: 10601 - DNA, 19 bp, Artificial Sequence
  Description of Artificial Sequence: Synthetic primer
ttacaggccgcatagcaac

SEQ ID NO: 10602 - DNA, 19 bp, Artificial Sequence
  Description of Artificial Sequence: Synthetic primer
tgcgagcccatgtctcaac

SEQ ID NO: 10603 - DNA, 51 bp, Artificial Sequence; identical to SEQ ID NO: 5341
  Description of Artificial Sequence: Synthetic primer
  Description of Combined DNA/RNA Molecule: Synthetic primer

SEQ ID NO: 10604 - DNA, 44 bp, Artificial Sequence; identical to SEQ ID NO: 5342
  Description of Artificial Sequence: Synthetic primer
  Description of Combined DNA/RNA Molecule: Synthetic primer

SEQ ID NO: 10605 - DNA, 49 bp, Artificial Sequence; identical to SEQ ID NO: 5343
  Description of Artificial Sequence: Synthetic primer
  Description of Combined DNA/RNA Molecule: Synthetic primer

SEQ ID NO: 10606 - DNA, 48 bp, Artificial Sequence; identical to SEQ ID NO: 5344
  Description of Artificial Sequence: Synthetic primer
  Description of Combined DNA/RNA Molecule: Synthetic primer

SEQ ID NO: 10607 - DNA, 44 bp, Artificial Sequence; identical to SEQ ID NO: 5345
  Description of Artificial Sequence: Synthetic oligonucleotide
  Description of Combined DNA/RNA Molecule: Synthetic oligonucleotide

SEQ ID NO: 10608 - DNA, 41 bp, Artificial Sequence; identical to SEQ ID NO: 5346
  Description of Artificial Sequence: Synthetic oligonucleotide

SEQ ID NO: 10609 - DNA, 25 bp, Artificial Sequence
  Description of Artificial Sequence: Synthetic probe
tttcctacagccagtgcctccacac

SEQ ID NO: 10610 - DNA, 19 bp, Artificial Sequence
  Description of Artificial Sequence: Synthetic primer
ttcgcctaccgcagtgaac

SEQ ID NO: 10611 - DNA, 19 bp, Artificial Sequence
  Description of Artificial Sequence: Synthetic primer
tgcgagcccatgtctcaac

SEQ ID NO: 10612 - DNA, 44 bp, Artificial Sequence; identical to SEQ ID NO: 5350
  Description of Artificial Sequence: Synthetic primer
  Description of Combined DNA/RNA Molecule: Synthetic primer

SEQ ID NO: 10613 - DNA, 40 bp, Artificial Sequence; identical to SEQ ID NO: 5478
  Description of Artificial Sequence: Synthetic primer
  Description of Combined DNA/RNA Molecule: Synthetic primer

SEQ ID NO: 10614 - DNA, 40 bp, Artificial Sequence; identical to SEQ ID NO: 5479
  Description of Artificial Sequence: Synthetic primer
  Description of Combined DNA/RNA Molecule: Synthetic primer

SEQ ID NO: 10615 - DNA, 58 bp, Artificial Sequence; identical to SEQ ID NO: 5480
  Description of Artificial Sequence: Synthetic primer
  Description of Combined DNA/RNA Molecule: Synthetic primer

SEQ ID NO: 10616 - DNA, 48 bp, Artificial Sequence; identical to SEQ ID NO: 5481
  Description of Artificial Sequence: Synthetic oligonucleotide
  Description of Combined DNA/RNA Molecule: Synthetic oligonucleotide

SEQ ID NO: 10617 - DNA, 53 bp, Artificial Sequence; identical to SEQ ID NO: 5482
  Description of Artificial Sequence: Synthetic oligonucleotide

SEQ ID NO: 10618 - DNA, 23 bp, Artificial Sequence
  Description of Artificial Sequence: Synthetic probe
ttgagcgcacttcctggcatggg

SEQ ID NO: 10619 - DNA, 21 bp, Artificial Sequence
  Description of Artificial Sequence: Synthetic primer
tacacgtggatatctccgacc

SEQ ID NO: 10620 - DNA, 21 bp, Artificial Sequence
  Description of Artificial Sequence: Synthetic primer
tggaactgtgtgactagcacc

SEQ ID NO: 10621 - DNA, 59 bp, Artificial Sequence; identical to SEQ ID NO: 5486
  Description of Artificial Sequence: Synthetic primer
  Description of Combined DNA/RNA Molecule: Synthetic primer

SEQ ID NO: 10622 - DNA, 45 bp, Artificial Sequence; identical to SEQ ID NO: 5496
  Description of Artificial Sequence: Synthetic primer
  Description of Combined DNA/RNA Molecule: Synthetic primer

SEQ ID NO: 10623 - DNA, 46 bp, Artificial Sequence; identical to SEQ ID NO: 5497
  Description of Artificial Sequence: Synthetic primer
  Description of Combined DNA/RNA Molecule: Synthetic primer

SEQ ID NO: 10624 - DNA, 55 bp, Artificial Sequence; identical to SEQ ID NO: 5498
  Description of Artificial Sequence: Synthetic primer
  Description of Combined DNA/RNA Molecule: Synthetic primer

SEQ ID NO: 10625 - DNA, 54 bp, Artificial Sequence; identical to SEQ ID NO: 5499
  Description of Artificial Sequence: Synthetic oligonucleotide
  Description of Combined DNA/RNA Molecule: Synthetic oligonucleotide

SEQ ID NO: 10626 - DNA, 53 bp, Artificial Sequence; identical to SEQ ID NO: 5500
  Description of Artificial Sequence: Synthetic oligonucleotide

SEQ ID NO: 10627 - DNA, 29 bp, Artificial Sequence
  Description of Artificial Sequence: Synthetic probe
cctgggacaatggagagagtctcactctg

SEQ ID NO: 10628 - DNA, 22 bp, Artificial Sequence
  Description of Artificial Sequence: Synthetic primer
tcgatggtcaatgagcttcaca

SEQ ID NO: 10629 - DNA, 22 bp, Artificial Sequence
  Description of Artificial Sequence: Synthetic primer
tggagagggagatcacgtaaca

SEQ ID NO: 10630 - DNA, 51 bp, Artificial Sequence; identical to SEQ ID NO: 5504
  Description of Artificial Sequence: Synthetic primer
  Description of Combined DNA/RNA Molecule: Synthetic primer

SEQ ID NO: 10631 - DNA, 38 bp, Artificial Sequence; identical to SEQ ID NO: 5886
  Description of Artificial Sequence: Synthetic primer
  Description of Combined DNA/RNA Molecule: Synthetic primer

SEQ ID NO: 10632 - DNA, 40 bp, Artificial Sequence; identical to SEQ ID NO: 5887
  Description of Artificial Sequence: Synthetic primer
  Description of Combined DNA/RNA Molecule: Synthetic primer

SEQ ID NO: 10633 - DNA, 52 bp, Artificial Sequence; identical to SEQ ID NO: 5888
  Description of Artificial Sequence: Synthetic primer
  Description of Combined DNA/RNA Molecule: Synthetic primer

SEQ ID NO: 10634 - DNA, 51 bp, Artificial Sequence; identical to SEQ ID NO: 5889
  Description of Artificial Sequence: Synthetic oligonucleotide
  Description of Combined DNA/RNA Molecule: Synthetic oligonucleotide

SEQ ID NO: 10635 - DNA, 48 bp, Artificial Sequence; identical to SEQ ID NO: 5890
  Description of Artificial Sequence: Synthetic oligonucleotide

SEQ ID NO: 10636 - DNA, 32 bp, Artificial Sequence; identical to SEQ ID NO: 5891
  Description of Artificial Sequence: Synthetic probe

SEQ ID NO: 10637 - DNA, 21 bp, Artificial Sequence
  Description of Artificial Sequence: Synthetic primer
tctcataccagacgcggtaac

SEQ ID NO: 10638 - DNA, 19 bp, Artificial Sequence
  Description of Artificial Sequence: Synthetic primer
taagcacagcgacacgaac

SEQ ID NO: 10639 - DNA, 47 bp, Artificial Sequence; identical to SEQ ID NO: 5894
  Description of Artificial Sequence: Synthetic primer
  Description of Combined DNA/RNA Molecule: Synthetic primer

SEQ ID NO: 10640 - DNA, 37 bp, Artificial Sequence; identical to SEQ ID NO: 6057
  Description of Artificial Sequence: Synthetic primer
  Description of Combined DNA/RNA Molecule: Synthetic primer

SEQ ID NO: 10641 - DNA, 40 bp, Artificial Sequence; identical to SEQ ID NO: 6058
  Description of Artificial Sequence: Synthetic primer
  Description of Combined DNA/RNA Molecule: Synthetic primer

SEQ ID NO: 10642 - DNA, 50 bp, Artificial Sequence; identical to SEQ ID NO: 6059
  Description of Artificial Sequence: Synthetic primer
  Description of Combined DNA/RNA Molecule: Synthetic primer

SEQ ID NO: 10643 - DNA, 45 bp, Artificial Sequence; identical to SEQ ID NO: 6060
  Description of Artificial Sequence: Synthetic oligonucleotide
  Description of Combined DNA/RNA Molecule: Synthetic oligonucleotide

SEQ ID NO: 10644 - DNA, 38 bp, Artificial Sequence; identical to SEQ ID NO: 6061
  Description of Artificial Sequence: Synthetic oligonucleotide

SEQ ID NO: 10645 - DNA, 25 bp, Artificial Sequence
  Description of Artificial Sequence: Synthetic probe
ttagtgacatggcagtgggctctgg

SEQ ID NO: 10646 - DNA, 20 bp, Artificial Sequence
  Description of Artificial Sequence: Synthetic primer
ttctaggcgacacgacaaca

SEQ ID NO: 10647 - DNA, 19 bp, Artificial Sequence
  Description of Artificial Sequence: Synthetic primer
tccacggacagtacccaca

SEQ ID NO: 10648 - DNA, 44 bp, Artificial Sequence; identical to SEQ ID NO: 6065
  Description of Artificial Sequence: Synthetic primer
  Description of Combined DNA/RNA Molecule: Synthetic primer

SEQ ID NO: 10649 - DNA, 43 bp, Artificial Sequence; identical to SEQ ID NO: 6308
  Description of Artificial Sequence: Synthetic primer
  Description of Combined DNA/RNA Molecule: Synthetic primer

SEQ ID NO: 10650 - DNA, 37 bp, Artificial Sequence; identical to SEQ ID NO: 6309
  Description of Artificial Sequence: Synthetic primer
  Description of Combined DNA/RNA Molecule: Synthetic primer

SEQ ID NO: 10651 - DNA, 50 bp, Artificial Sequence; identical to SEQ ID NO: 6310
  Description of Artificial Sequence: Synthetic primer
  Description of Combined DNA/RNA Molecule: Synthetic primer

SEQ ID NO: 10652 - DNA, 45 bp, Artificial Sequence; identical to SEQ ID NO: 6311
  Description of Artificial Sequence: Synthetic oligonucleotide
  Description of Combined DNA/RNA Molecule: Synthetic oligonucleotide

SEQ ID NO: 10653 - DNA, 47 bp, Artificial Sequence; identical to SEQ ID NO: 6312
  Description of Artificial Sequence: Synthetic oligonucleotide

SEQ ID NO: 10654 - DNA, 29 bp, Artificial Sequence
  Description of Artificial Sequence: Synthetic probe
aatgggtcatgatcatctcacaccagcag

SEQ ID NO: 10655 - DNA, 19 bp, Artificial Sequence
  Description of Artificial Sequence: Synthetic primer
tagccgatggcgtaaaacc

SEQ ID NO: 10656 - DNA, 20 bp, Artificial Sequence
  Description of Artificial Sequence: Synthetic primer
tgcgagcaagtcatacgacc

SEQ ID NO: 10657 - DNA, 46 bp, Artificial Sequence; identical to SEQ ID NO: 6316
  Description of Artificial Sequence: Synthetic primer
  Description of Combined DNA/RNA Molecule: Synthetic primer

SEQ ID NO: 10658 - DNA, 39 bp, Artificial Sequence; identical to SEQ ID NO: 7808
  Description of Artificial Sequence: Synthetic primer
  Description of Combined DNA/RNA Molecule: Synthetic primer

SEQ ID NO: 10659 - DNA, 41 bp, Artificial Sequence; identical to SEQ ID NO: 7809
  Description of Artificial Sequence: Synthetic primer
  Description of Combined DNA/RNA Molecule: Synthetic primer

SEQ ID NO: 10660 - DNA, 50 bp, Artificial Sequence; identical to SEQ ID NO: 7810
  Description of Artificial Sequence: Synthetic primer
  Description of Combined DNA/RNA Molecule: Synthetic primer

SEQ ID NO: 10661 - DNA, 45 bp, Artificial Sequence; identical to SEQ ID NO: 7811
  Description of Artificial Sequence: Synthetic oligonucleotide
  Description of Combined DNA/RNA Molecule: Synthetic oligonucleotide

SEQ ID NO: 10662 - DNA, 43 bp, Artificial Sequence; identical to SEQ ID NO: 7812
  Description of Artificial Sequence: Synthetic oligonucleotide

SEQ ID NO: 10663 - DNA, 23 bp, Artificial Sequence
  Description of Artificial Sequence: Synthetic probe
tttgtgacaggcagccaggagag

SEQ ID NO: 10664 - DNA, 20 bp, Artificial Sequence
  Description of Artificial Sequence: Synthetic primer
tttttacgcacagcaccacc

SEQ ID NO: 10665 - DNA, 22 bp, Artificial Sequence
  Description of Artificial Sequence: Synthetic primer
tgtctaagccgcctatgtaacc

SEQ ID NO: 10666 - DNA, 48 bp, Artificial Sequence; identical to SEQ ID NO: 7816
  Description of Artificial Sequence: Synthetic primer
  Description of Combined DNA/RNA Molecule: Synthetic primer

SEQ ID NO: 10667 - DNA, 39 bp, Artificial Sequence; identical to SEQ ID NO: 8193
  Description of Artificial Sequence: Synthetic primer
  Description of Combined DNA/RNA Molecule: Synthetic primer

SEQ ID NO: 10668 - DNA, 40 bp, Artificial Sequence; identical to SEQ ID NO: 8194
  Description of Artificial Sequence: Synthetic primer
  Description of Combined DNA/RNA Molecule: Synthetic primer

SEQ ID NO: 10669 - DNA, 56 bp, Artificial Sequence; identical to SEQ ID NO: 8195
  Description of Artificial Sequence: Synthetic primer
  Description of Combined DNA/RNA Molecule: Synthetic primer

SEQ ID NO: 10670 - DNA, 45 bp, Artificial Sequence; identical to SEQ ID NO: 8196
  Description of Artificial Sequence: Synthetic oligonucleotide
  Description of Combined DNA/RNA Molecule: Synthetic oligonucleotide

SEQ ID NO: 10671 - DNA, 53 bp, Artificial Sequence; identical to SEQ ID NO: 8197
  Description of Artificial Sequence: Synthetic oligonucleotide

SEQ ID NO: 10672 - DNA, 29 bp, Artificial Sequence
  Description of Artificial Sequence: Synthetic probe
tttcagacaccaagcactgtgcaatccac

SEQ ID NO: 10673 - DNA, 22 bp, Artificial Sequence
  Description of Artificial Sequence: Synthetic primer
tatggtaaaatgtcagcggcac

SEQ ID NO: 10674 - DNA, 21 bp, Artificial Sequence
  Description of Artificial Sequence: Synthetic primer
ttagcaacaacggagcatcac

SEQ ID NO: 10675 - DNA, 51 bp, Artificial Sequence; identical to SEQ ID NO: 8201
  Description of Artificial Sequence: Synthetic primer
  Description of Combined DNA/RNA Molecule: Synthetic primer

SEQ ID NO: 10676 - DNA, 39 bp, Artificial Sequence; identical to SEQ ID NO: 8618
  Description of Artificial Sequence: Synthetic primer
  Description of Combined DNA/RNA Molecule: Synthetic primer

SEQ ID NO: 10677 - DNA, 38 bp, Artificial Sequence; identical to SEQ ID NO: 8619
  Description of Artificial Sequence: Synthetic primer
  Description of Combined DNA/RNA Molecule: Synthetic primer

SEQ ID NO: 10678 - DNA, 49 bp, Artificial Sequence; identical to SEQ ID NO: 8620
  Description of Artificial Sequence: Synthetic primer
  Description of Combined DNA/RNA Molecule: Synthetic primer

SEQ ID NO: 10679 - DNA, 54 bp, Artificial Sequence; identical to SEQ ID NO: 8621
  Description of Artificial Sequence: Synthetic oligonucleotide
  Description of Combined DNA/RNA Molecule: Synthetic oligonucleotide

SEQ ID NO: 10680 - DNA, 44 bp, Artificial Sequence; identical to SEQ ID NO: 8622
  Description of Artificial Sequence: Synthetic oligonucleotide

SEQ ID NO: 10681 - DNA, 26 bp, Artificial Sequence
  Description of Artificial Sequence: Synthetic probe
aatccagcatgctgcagttcccacac

SEQ ID NO: 10682 - DNA, 21 bp, Artificial Sequence
  Description of Artificial Sequence: Synthetic primer
tactatcgtatcacgccgaca

SEQ ID NO: 10683 - DNA, 19 bp, Artificial Sequence
  Description of Artificial Sequence: Synthetic primer
ttagcccacggacgttaca

SEQ ID NO: 10684 - DNA, 47 bp, Artificial Sequence; identical to SEQ ID NO: 8626
  Description of Artificial Sequence: Synthetic primer
  Description of Combined DNA/RNA Molecule: Synthetic primer

SEQ ID NO: 10685 - DNA, 41 bp, Artificial Sequence; identical to SEQ ID NO: 8635
  Description of Artificial Sequence: Synthetic primer
  Description of Combined DNA/RNA Molecule: Synthetic primer

SEQ ID NO: 10686 - DNA, 41 bp, Artificial Sequence; identical to SEQ ID NO: 8636
  Description of Artificial Sequence: Synthetic primer
  Description of Combined DNA/RNA Molecule: Synthetic primer

SEQ ID NO: 10687 - DNA, 53 bp, Artificial Sequence; identical to SEQ ID NO: 8637
  Description of Artificial Sequence: Synthetic primer
  Description of Combined DNA/RNA Molecule: Synthetic primer

SEQ ID NO: 10688 - DNA, 47 bp, Artificial Sequence; identical to SEQ ID NO: 8638
  Description of Artificial Sequence: Synthetic oligonucleotide
  Description of Combined DNA/RNA Molecule: Synthetic oligonucleotide

SEQ ID NO: 10689 - DNA, 42 bp, Artificial Sequence; identical to SEQ ID NO: 8639
  Description of Artificial Sequence: Synthetic oligonucleotide

SEQ ID NO: 10690 - DNA, 25 bp, Artificial Sequence
  Description of Artificial Sequence: Synthetic probe
ttcactccactggcaccaccacagc

SEQ ID NO: 10691 - DNA, 19 bp, Artificial Sequence
  Description of Artificial Sequence: Synthetic primer
tcgcaacgtgccgaataca

SEQ ID NO: 10692 - DNA, 19 bp, Artificial Sequence
  Description of Artificial Sequence: Synthetic primer
ttagctcgaccgtgcaaca

SEQ ID NO: 10693 - DNA, 48 bp, Artificial Sequence; identical to SEQ ID NO: 8643
  Description of Artificial Sequence: Synthetic primer
  Description of Combined DNA/RNA Molecule: Synthetic primer

SEQ ID NO: 10694 - DNA, 41 bp, Artificial Sequence
  Description of Artificial Sequence: Synthetic primer
  Description of Combined DNA/RNA Molecule: Synthetic primer
acgacgacgacgaacctctcccagcagctgtaagcaccctg

SEQ ID NO: 10695 - DNA, 42 bp, Artificial Sequence
  Description of Artificial Sequence: Synthetic primer
  Description of Combined DNA/RNA Molecule: Synthetic primer
acgacgacgacgaacccagcagctgtaagcaccctacagttc

SEQ ID NO: 10696 - DNA, 52 bp, Artificial Sequence
  Description of Artificial Sequence: Synthetic primer
  Description of Combined DNA/RNA Molecule: Synthetic primer
acgacgacgacttgacgaacataatcctggactttccccacagtgcagtgtt

SEQ ID NO: 10697 - DNA, 51 bp, Artificial Sequence
  Description of Artificial Sequence: Synthetic oligonucleotide
  Description of Combined DNA/RNA Molecule: Synthetic oligonucleotide
taccactcatcttctgcgacaccttttgcactgtctgcaggtatcactgcc

SEQ ID NO: 10698 - DNA, 47 bp, Artificial Sequence
  Description of Artificial Sequence: Synthetic oligonucleotide
ctgttccagccctgagaggacaaggagtgtgagtcgatctacccgca

SEQ ID NO: 10699 - DNA, 28 bp, Artificial Sequence
  Description of Artificial Sequence: Synthetic probe
ttggtatcactgttccagccctgagagg

SEQ ID NO: 10700 - DNA, 21 bp, Artificial Sequence
  Description of Artificial Sequence: Synthetic primer
taccactcatcttctgcgaca

SEQ ID NO: 10701 - DNA, 20 bp, Artificial Sequence
  Description of Artificial Sequence: Synthetic primer
tgcgggtagatcgactcaca

SEQ ID NO: 10702 - DNA, 46 bp, Artificial Sequence
  Description of Artificial Sequence: Synthetic primer
  Description of Combined DNA/RNA Molecule: Synthetic primer
tgcgggtagatcgactcacacccacagtgcagtgtccccctgtccc

SEQ ID NO: 10703 - DNA, 40 bp, Artificial Sequence
  Description of Artificial Sequence: Synthetic primer
  Description of Combined DNA/RNA Molecule: Synthetic primer
acgacgacgacgaagcaagcagggcaccaggatcagggag

SEQ ID NO: 10704 - DNA, 38 bp, Artificial Sequence
  Description of Artificial Sequence: Synthetic primer
  Description of Combined DNA/RNA Molecule: Synthetic primer
acgacgacgacgaaggcaagcagggcaccaggaucaga

SEQ ID NO: 10705 - DNA, 56 bp, Artificial Sequence
  Description of Artificial Sequence: Synthetic primer
  Description of Combined DNA/RNA Molecule: Synthetic primer
acgacgacgacttgacgaacataatccaaagcagtggagttaggaactggauttga

SEQ ID NO: 10706 - DNA, 44 bp, Artificial Sequence
  Description of Artificial Sequence: Synthetic oligonucleotide
  Description of Combined DNA/RNA Molecule: Synthetic oligonucleotide
tctcatgggcgctagtatcaaccctccctgggcacctcaccaag

SEQ ID NO: 10707 - DNA, 48 bp, Artificial Sequence
  Description of Artificial Sequence: Synthetic oligonucleotide
ccagagcaccatgcccagacacacacgtttccctgattgatacccgca

SEQ ID NO: 10708 - DNA, 25 bp, Artificial Sequence
  Description of Artificial Sequence: Synthetic probe
ttcacctcaccagagcaccatgccc

SEQ ID NO: 10709 - DNA, 22 bp, Artificial Sequence
  Description of Artificial Sequence: Synthetic primer
tctcatgggcgctagtatcaac

SEQ ID NO: 10710 - DNA, 22 bp, Artificial Sequence
  Description of Artificial Sequence: Synthetic primer
tgcgggtatcaatcagggaaac

SEQ ID NO: 10711 - DNA, 54 bp, Artificial Sequence
  Description of Artificial Sequence: Synthetic primer
  Description of Combined DNA/RNA Molecule: Synthetic primer
tgcgggtatcaatcagggaaacgcagtggagttaggaactggatttgatgtgta

SEQ ID NO: 10712 - DNA, 46 bp, Artificial Sequence
  Description of Artificial Sequence: Synthetic primer
  Description of Combined DNA/RNA Molecule: Synthetic primer
acgacgacgacgaagtggaacttgagacacaggtggactcagggaa

SEQ ID NO: 10713 - DNA, 45 bp, Artificial Sequence
  Description of Artificial Sequence: Synthetic primer
  Description of Combined DNA/RNA Molecule: Synthetic primer
acgacgacgacgaacagcacatggtggaacttgagacacaggtga

SEQ ID NO: 10714 - DNA, 54 bp, Artificial Sequence
  Description of Artificial Sequence: Synthetic primer
  Description of Combined DNA/RNA Molecule: Synthetic primer
acgacgacgacttgacgaacataatggaagggaggatggaggatggtgguggtt

SEQ ID NO: 10715 - DNA, 47 bp, Artificial Sequence
  Description of Artificial Sequence: Synthetic oligonucleotide
  Description of Combined DNA/RNA Molecule: Synthetic oligonucleotide
tggatcgagacggaatgcaacctgctcattgaggaagggacauggca

SEQ ID NO: 10716 - DNA, 44 bp, Artificial Sequence
  Description of Artificial Sequence: Synthetic oligonucleotide
tggtgtccatggccagcccctggtttccctgattgatacccgca

SEQ ID NO: 10717 - DNA, 25 bp, Artificial Sequence
  Description of Artificial Sequence: Synthetic probe
ttagggacatggtgtccatggccag

SEQ ID NO: 10718 - DNA, 21 bp, Artificial Sequence
  Description of Artificial Sequence: Synthetic primer
tggatcgagacggaatgcaac

SEQ ID NO: 10719 - DNA, 22 bp, Artificial Sequence
  Description of Artificial Sequence: Synthetic primer
tgcgggtatcaatcagggaaac

SEQ ID NO: 10720 - DNA, 51 bp, Artificial Sequence
  Description of Artificial Sequence: Synthetic primer
  Description of Combined DNA/RNA Molecule: Synthetic primer
tgcgggtatcaatcagggaaacgaagggaggatggaggatggtgatggtcg

SEQ ID NO: 10721 - DNA, 46 bp, Artificial Sequence
  Description of Artificial Sequence: Synthetic primer
  Description of Combined DNA/RNA Molecule: Synthetic primer
acgacgacgacgaaggtcacctttctttcagactcaatgcaaggag

SEQ ID NO: 10722 - DNA, 48 bp, Artificial Sequence
  Description of Artificial Sequence: Synthetic primer
  Description of Combined DNA/RNA Molecule: Synthetic primer
acgacgacgacgaacacctttctttcagactcaatgcaaggaaggaac

SEQ ID NO: 10723 - DNA, 55 bp, Artificial Sequence
  Description of Artificial Sequence: Synthetic primer
  Description of Combined DNA/RNA Molecule: Synthetic primer
acgacgacgacttgacgaacataattgcttgctcttgaagtggcaaacccacaag

SEQ ID NO: 10724 - DNA, 58 bp, Artificial Sequence
  Description of Artificial Sequence: Synthetic oligonucleotide
  Description of Combined DNA/RNA Molecule: Synthetic oligonucleotide
tcctgagggacaaatacacacccttgcctctcatctccttttacagtacaacactgga

SEQ ID NO: 10725 - DNA, 45 bp, Artificial Sequence
  Description of Artificial Sequence: Synthetic oligonucleotide
ctgaggtgggagcagggaaggagaggtaggtaaggaagtcacgca

SEQ ID NO: 10726 - DNA, 25 bp, Artificial Sequence
  Description of Artificial Sequence: Synthetic probe
tttacaacactgaggtgggagcagg

SEQ ID NO: 10727 - DNA, 22 bp, Artificial Sequence
  Description of Artificial Sequence: Synthetic primer
tcctgagggacaaatacacacc

SEQ ID NO: 10728 - DNA, 21 bp, Artificial Sequence
  Description of Artificial Sequence: Synthetic primer
tgcgtgacttccttacctacc

SEQ ID NO: 10729 - DNA, 52 bp, Artificial Sequence
  Description of Artificial Sequence: Synthetic primer
  Description of Combined DNA/RNA Molecule: Synthetic primer
tgcgtgacttccttacctaccaaacccacaaagacatgtttcctgttgggtt

SEQ ID NO: 10730 - DNA, 36 bp, Artificial Sequence; identical to SEQ ID NO: 1331
  Description of Artificial Sequence: Synthetic primer
  Description of Combined DNA/RNA Molecule: Synthetic primer

SEQ ID NO: 10731 - DNA, 42 bp, Artificial Sequence; identical to SEQ ID NO: 1332
  Description of Artificial Sequence: Synthetic primer
  Description of Combined DNA/RNA Molecule: Synthetic primer

SEQ ID NO: 10732 - DNA, 56 bp, Artificial Sequence; identical to SEQ ID NO: 1333
  Description of Artificial Sequence: Synthetic primer
  Description of Combined DNA/RNA Molecule: Synthetic primer

SEQ ID NO: 10733 - DNA, 45 bp, Artificial Sequence; identical to SEQ ID NO: 1334
  Description of Artificial Sequence: Synthetic oligonucleotide
  Description of Combined DNA/RNA Molecule: Synthetic oligonucleotide

SEQ ID NO: 10734 - DNA, 47 bp, Artificial Sequence; identical to SEQ ID NO: 1335
  Description of Artificial Sequence: Synthetic oligonucleotide

SEQ ID NO: 10735 - DNA, 29 bp, Artificial Sequence
  Description of Artificial Sequence: Synthetic probe
ttgtgaacatcaagtgagaggccacacac

SEQ ID NO: 10736 - DNA, 19 bp, Artificial Sequence
  Description of Artificial Sequence: Synthetic primer
ttacaggccgcatagcaac

SEQ ID NO: 10737 - DNA, 19 bp, Artificial Sequence
  Description of Artificial Sequence: Synthetic primer
tgcgagcccatgtctcaac

SEQ ID NO: 10738 - DNA, 49 bp, Artificial Sequence; identical to SEQ ID NO: 1339
  Description of Artificial Sequence: Synthetic primer
  Description of Combined DNA/RNA Molecule: Synthetic primer

SEQ ID NO: 10739 - DNA, 46 bp, Artificial Sequence; identical to SEQ ID NO: 1613
  Description of Artificial Sequence: Synthetic primer
  Description of Combined DNA/RNA Molecule: Synthetic primer

SEQ ID NO: 10740 - DNA, 47 bp, Artificial Sequence; identical to SEQ ID NO: 1614
  Description of Artificial Sequence: Synthetic primer
  Description of Combined DNA/RNA Molecule: Synthetic primer

SEQ ID NO: 10741 - DNA, 54 bp, Artificial Sequence; identical to SEQ ID NO: 1615
  Description of Artificial Sequence: Synthetic primer
  Description of Combined DNA/RNA Molecule: Synthetic primer

SEQ ID NO: 10742 - DNA, 44 bp, Artificial Sequence; identical to SEQ ID NO: 1616
  Description of Artificial Sequence: Synthetic oligonucleotide
  Description of Combined DNA/RNA Molecule: Synthetic oligonucleotide

SEQ ID NO: 10743 - DNA, 40 bp, Artificial Sequence; identical to SEQ ID NO: 1617
  Description of Artificial Sequence: Synthetic oligonucleotide

SEQ ID NO: 10744 - DNA, 19 bp, Artificial Sequence
  Description of Artificial Sequence: Synthetic probe
ttacccccagcagccaccc

SEQ ID NO: 10745 - DNA, 19 bp, Artificial Sequence
  Description of Artificial Sequence: Synthetic primer
ttcgtccctgcacgctaac

SEQ ID NO: 10746 - DNA, 20 bp, Artificial Sequence
  Description of Artificial Sequence: Synthetic primer
tggcctaacggtgatggaac

SEQ ID NO: 10747 - DNA, 46 bp, Artificial Sequence; identical to SEQ ID NO: 1621
  Description of Artificial Sequence: Synthetic primer
  Description of Combined DNA/RNA Molecule: Synthetic primer

SEQ ID NO: 10748 - DNA, 40 bp, Artificial Sequence; identical to SEQ ID NO: 5261
  Description of Artificial Sequence: Synthetic primer
  Description of Combined DNA/RNA Molecule: Synthetic primer

SEQ ID NO: 10749 - DNA, 45 bp, Artificial Sequence; identical to SEQ ID NO: 5262
  Description of Artificial Sequence: Synthetic primer
  Description of Combined DNA/RNA Molecule: Synthetic primer

SEQ ID NO: 10750 - DNA, 53 bp, Artificial Sequence; identical to SEQ ID NO: 5263
  Description of Artificial Sequence: Synthetic primer
  Description of Combined DNA/RNA Molecule: Synthetic primer

SEQ ID NO: 10751 - DNA, 43 bp, Artificial Sequence; identical to SEQ ID NO: 5264
  Description of Artificial Sequence: Synthetic oligonucleotide
  Description of Combined DNA/RNA Molecule: Synthetic oligonucleotide

SEQ ID NO: 10752 - DNA, 41 bp, Artificial Sequence; identical to SEQ ID NO: 5265
  Description of Artificial Sequence: Synthetic oligonucleotide

SEQ ID NO: 10753 - DNA, 24 bp, Artificial Sequence
  Description of Artificial Sequence: Synthetic probe
ttcaggtcagcaggcccagggaag

SEQ ID NO: 10754 - DNA, 19 bp, Artificial Sequence
  Description of Artificial Sequence: Synthetic primer
tagacacgagcgaggtcac

SEQ ID NO: 10755 - DNA, 21 bp, Artificial Sequence
  Description of Artificial Sequence: Synthetic primer
tgcacagcctgaattttgcac

SEQ ID NO: 10756 - DNA, 46 bp, Artificial Sequence; identical to SEQ ID NO: 5269
  Description of Artificial Sequence: Synthetic primer
  Description of Combined DNA/RNA Molecule: Synthetic primer

SEQ ID NO: 10757 - DNA, 40 bp, Artificial Sequence; identical to SEQ ID NO: 1826
  Description of Artificial Sequence: Synthetic primer
  Description of Combined DNA/RNA Molecule: Synthetic primer

SEQ ID NO: 10758 - DNA, 39 bp, Artificial Sequence; identical to SEQ ID NO: 1827
  Description of Artificial Sequence: Synthetic primer
  Description of Combined DNA/RNA Molecule: Synthetic primer

SEQ ID NO: 10759 - DNA, 52 bp, Artificial Sequence; identical to SEQ ID NO: 1828
  Description of Artificial Sequence: Synthetic primer
  Description of Combined DNA/RNA Molecule: Synthetic primer

SEQ ID NO: 10760 - DNA, 42 bp, Artificial Sequence; identical to SEQ ID NO: 1829
  Description of Artificial Sequence: Synthetic oligonucleotide
  Description of Combined DNA/RNA Molecule: Synthetic oligonucleotide

SEQ ID NO: 10761 - DNA, 43 bp, Artificial Sequence; identical to SEQ ID NO: 1830
  Description of Artificial Sequence: Synthetic oligonucleotide

SEQ ID NO: 10762 - DNA, 23 bp, Artificial Sequence
  Description of Artificial Sequence: Synthetic probe
aaggtgtcaggcagggctgcact

SEQ ID NO: 10763 - DNA, 19 bp, Artificial Sequence
  Description of Artificial Sequence: Synthetic primer
ttcgctgcccggttaaaca

SEQ ID NO: 10764 - DNA, 22 bp, Artificial Sequence
  Description of Artificial Sequence: Synthetic primer
tgtcgagctaggtccgataaca

SEQ ID NO: 10765 - DNA, 45 bp, Artificial Sequence; identical to SEQ ID NO: 1834
  Description of Artificial Sequence: Synthetic primer
  Description of Combined DNA/RNA Molecule: Synthetic primer

SEQ ID NO: 10766 - DNA, 41 bp, Artificial Sequence; identical to SEQ ID NO: 5297
  Description of Artificial Sequence: Synthetic primer
  Description of Combined DNA/RNA Molecule: Synthetic primer

SEQ ID NO: 10767 - DNA, 42 bp, Artificial Sequence; identical to SEQ ID NO: 5298
  Description of Artificial Sequence: Synthetic primer
  Description of Combined DNA/RNA Molecule: Synthetic primer

SEQ ID NO: 10768 - DNA, 51 bp, Artificial Sequence; identical to SEQ ID NO: 5299
  Description of Artificial Sequence: Synthetic primer
  Description of Combined DNA/RNA Molecule: Synthetic primer

SEQ ID NO: 10769 - DNA, 45 bp, Artificial Sequence; identical to SEQ ID NO: 5300
  Description of Artificial Sequence: Synthetic oligonucleotide
  Description of Combined DNA/RNA Molecule: Synthetic oligonucleotide

SEQ ID NO: 10770 - DNA, 46 bp, Artificial Sequence; identical to SEQ ID NO: 5301
  Description of Artificial Sequence: Synthetic oligonucleotide

SEQ ID NO: 10771 - DNA, 23 bp, Artificial Sequence
  Description of Artificial Sequence: Synthetic probe
ccgaggtcaggagtcagcccacc

SEQ ID NO: 10772 - DNA, 19 bp, Artificial Sequence
  Description of Artificial Sequence: Synthetic primer
taaccagttaccaccgcca

SEQ ID NO: 10773 - DNA, 21 bp, Artificial Sequence
  Description of Artificial Sequence: Synthetic primer
tgccctccaatctatcctcca

SEQ ID NO: 10774 - DNA, 49 bp, Artificial Sequence; identical to SEQ ID NO: 5305
  Description of Artificial Sequence: Synthetic primer
  Description of Combined DNA/RNA Molecule: Synthetic primer

SEQ ID NO: 10775 - DNA, 39 bp, Artificial Sequence; identical to SEQ ID NO: 5315
  Description of Artificial Sequence: Synthetic primer
  Description of Combined DNA/RNA Molecule: Synthetic primer

SEQ ID NO: 10776 - DNA, 39 bp, Artificial Sequence; identical to SEQ ID NO: 5316
  Description of Artificial Sequence: Synthetic primer
  Description of Combined DNA/RNA Molecule: Synthetic primer

SEQ ID NO: 10777 - DNA, 50 bp, Artificial Sequence; identical to SEQ ID NO: 5317
  Description of Artificial Sequence: Synthetic primer
  Description of Combined DNA/RNA Molecule: Synthetic primer

SEQ ID NO: 10778 - DNA, 51 bp, Artificial Sequence; identical to SEQ ID NO: 5318
  Description of Artificial Sequence: Synthetic oligonucleotide
  Description of Combined DNA/RNA Molecule: Synthetic oligonucleotide

SEQ ID NO: 10779 - DNA, 51 bp, Artificial Sequence; identical to SEQ ID NO: 5319
  Description of Artificial Sequence: Synthetic oligonucleotide

SEQ ID NO: 10780 - DNA, 29 bp, Artificial Sequence
  Description of Artificial Sequence: Synthetic probe
ttcccagcaccatgtgcctcaaccataac

SEQ ID NO: 10781 - DNA, 19 bp, Artificial Sequence
  Description of Artificial Sequence: Synthetic primer
ttgcacgttgtcctgcacc

SEQ ID NO: 10782 - DNA, 20 bp, Artificial Sequence
  Description of Artificial Sequence: Synthetic primer
tgccgtcatgggaaactacc

SEQ ID NO: 10783 - DNA, 44 bp, Artificial Sequence; identical to SEQ ID NO: 5323
  Description of Artificial Sequence: Synthetic primer
  Description of Combined DNA/RNA Molecule: Synthetic primer

SEQ ID NO: 10784 - DNA, 40 bp, Artificial Sequence; identical to SEQ ID NO: 5396
  Description of Artificial Sequence: Synthetic primer
  Description of Combined DNA/RNA Molecule: Synthetic primer

SEQ ID NO: 10785 - DNA, 40 bp, Artificial Sequence; identical to SEQ ID NO: 5397
  Description of Artificial Sequence: Synthetic primer
  Description of Combined DNA/RNA Molecule: Synthetic primer

SEQ ID NO: 10786 - DNA, 50 bp, Artificial Sequence; identical to SEQ ID NO: 5398
  Description of Artificial Sequence: Synthetic primer
  Description of Combined DNA/RNA Molecule: Synthetic primer

SEQ ID NO: 10787 - DNA, 46 bp, Artificial Sequence; identical to SEQ ID NO: 5399
  Description of Artificial Sequence: Synthetic oligonucleotide
  Description of Combined DNA/RNA Molecule: Synthetic oligonucleotide

SEQ ID NO: 10788 - DNA, 43 bp, Artificial Sequence; identical to SEQ ID NO: 5400
  Description of Artificial Sequence: Synthetic oligonucleotide

SEQ ID NO: 10789 - DNA, 20 bp, Artificial Sequence
  Description of Artificial Sequence: Synthetic probe
ttcccaccaggagccagcac

SEQ ID NO: 10790 - DNA, 19 bp, Artificial Sequence
  Description of Artificial Sequence: Synthetic primer
ttgcaacaggctaccgacc

SEQ ID NO: 10791 - DNA, 21 bp, Artificial Sequence
  Description of Artificial Sequence: Synthetic primer
tgcgtgacttccttacctacc

SEQ ID NO: 10792 - DNA, 46 bp, Artificial Sequence; identical to SEQ ID NO: 5404
  Description of Artificial Sequence: Synthetic primer
  Description of Combined DNA/RNA Molecule: Synthetic primer

SEQ ID NO: 10793 - DNA, 46 bp, Artificial Sequence; identical to SEQ ID NO: 5442
  Description of Artificial Sequence: Synthetic primer
  Description of Combined DNA/RNA Molecule: Synthetic primer

SEQ ID NO: 10794 - DNA, 44 bp, Artificial Sequence; identical to SEQ ID NO: 5443
  Description of Artificial Sequence: Synthetic primer
  Description of Combined DNA/RNA Molecule: Synthetic primer

SEQ ID NO: 10795 - DNA, 50 bp, Artificial Sequence; identical to SEQ ID NO: 5444
  Description of Artificial Sequence: Synthetic primer
  Description of Combined DNA/RNA Molecule: Synthetic primer

SEQ ID NO: 10796 - DNA, 48 bp, Artificial Sequence; identical to SEQ ID NO: 5445
  Description of Artificial Sequence: Synthetic oligonucleotide
  Description of Combined DNA/RNA Molecule: Synthetic oligonucleotide

SEQ ID NO: 10797 - DNA, 47 bp, Artificial Sequence; identical to SEQ ID NO: 5446
  Description of Artificial Sequence: Synthetic oligonucleotide

SEQ ID NO: 10798 - DNA, 25 bp, Artificial Sequence
  Description of Artificial Sequence: Synthetic probe
ttcaccgcaagcacctcatcccctc

SEQ ID NO: 10799 - DNA, 19 bp, Artificial Sequence
  Description of Artificial Sequence: Synthetic primer
ttgcacccgcgacataacc

SEQ ID NO: 10800 - DNA, 22 bp, Artificial Sequence
  Description of Artificial Sequence: Synthetic primer
tgctccgttcgagtgaattacc

SEQ ID NO: 10801 - DNA, 45 bp, Artificial Sequence; identical to SEQ ID NO: 5450
  Description of Artificial Sequence: Synthetic primer
  Description of Combined DNA/RNA Molecule: Synthetic primer

SEQ ID NO: 10802 - DNA, 42 bp, Artificial Sequence; identical to SEQ ID NO: 5505
  Description of Artificial Sequence: Synthetic primer
  Description of Combined DNA/RNA Molecule: Synthetic primer

SEQ ID NO: 10803 - DNA, 41 bp, Artificial Sequence; identical to SEQ ID NO: 5506
  Description of Artificial Sequence: Synthetic primer
  Description of Combined DNA/RNA Molecule: Synthetic primer

SEQ ID NO: 10804 - DNA, 50 bp, Artificial Sequence; identical to SEQ ID NO: 5507
  Description of Artificial Sequence: Synthetic primer
  Description of Combined DNA/RNA Molecule: Synthetic primer

SEQ ID NO: 10805 - DNA, 53 bp, Artificial Sequence; identical to SEQ ID NO: 5508
  Description of Artificial Sequence: Synthetic oligonucleotide
  Description of Combined DNA/RNA Molecule: Synthetic oligonucleotide

SEQ ID NO: 10806 - DNA, 51 bp, Artificial Sequence; identical to SEQ ID NO: 5509
  Description of Artificial Sequence: Synthetic oligonucleotide

SEQ ID NO: 10807 - DNA, 26 bp, Artificial Sequence
  Description of Artificial Sequence: Synthetic probe
aaggccgcatcccaaccagtttcaac

SEQ ID NO: 10808 - DNA, 21 bp, Artificial Sequence
  Description of Artificial Sequence: Synthetic primer
tctcgggaccacaatacgaac

SEQ ID NO: 10809 - DNA, 20 bp, Artificial Sequence
  Description of Artificial Sequence: Synthetic primer
tggcaccagcttagcgtaac

SEQ ID NO: 10810 - DNA, 46 bp, Artificial Sequence; identical to SEQ ID NO: 5513
  Description of Artificial Sequence: Synthetic primer
  Description of Combined DNA/RNA Molecule: Synthetic primer

SEQ ID NO: 10811 - DNA, 41 bp, Artificial Sequence; identical to SEQ ID NO: 5584
  Description of Artificial Sequence: Synthetic primer
  Description of Combined DNA/RNA Molecule: Synthetic primer

SEQ ID NO: 10812 - DNA, 41 bp, Artificial Sequence; identical to SEQ ID NO: 5585
  Description of Artificial Sequence: Synthetic primer
  Description of Combined DNA/RNA Molecule: Synthetic primer

SEQ ID NO: 10813 - DNA, 61 bp, Artificial Sequence; identical to SEQ ID NO: 5586
  Description of Artificial Sequence: Synthetic primer
  Description of Combined DNA/RNA Molecule: Synthetic primer

SEQ ID NO: 10814 - DNA, 46 bp, Artificial Sequence; identical to SEQ ID NO: 5587
  Description of Artificial Sequence: Synthetic oligonucleotide
  Description of Combined DNA/RNA Molecule: Synthetic oligonucleotide

SEQ ID NO: 10815 - DNA, 50 bp, Artificial Sequence; identical to SEQ ID NO: 5588
  Description of Artificial Sequence: Synthetic oligonucleotide

SEQ ID NO: 10816 - DNA, 29 bp, Artificial Sequence
  Description of Artificial Sequence: Synthetic probe
ttccctacactggactggttcaagcttcc

SEQ ID NO: 10817 - DNA, 22 bp, Artificial Sequence
  Description of Artificial Sequence: Synthetic primer
tccaaacgattaggagcgtcaa

SEQ ID NO: 10818 - DNA, 21 bp, Artificial Sequence
  Description of Artificial Sequence: Synthetic primer
tgggcgtatacctctgtccaa

SEQ ID NO: 10819 - DNA, 53 bp, Artificial Sequence; identical to SEQ ID NO: 5592
  Description of Artificial Sequence: Synthetic primer
  Description of Combined DNA/RNA Molecule: Synthetic primer

SEQ ID NO: 10820 - DNA, 46 bp, Artificial Sequence; identical to SEQ ID NO: 5611
  Description of Artificial Sequence: Synthetic primer
  Description of Combined DNA/RNA Molecule: Synthetic primer

SEQ ID NO: 10821 - DNA, 47 bp, Artificial Sequence; identical to SEQ ID NO: 5612
  Description of Artificial Sequence: Synthetic primer
  Description of Combined DNA/RNA Molecule: Synthetic primer

SEQ ID NO: 10822 - DNA, 49 bp, Artificial Sequence; identical to SEQ ID NO: 5613
  Description of Artificial Sequence: Synthetic primer
  Description of Combined DNA/RNA Molecule: Synthetic primer

SEQ ID NO: 10823 - DNA, 47 bp, Artificial Sequence; identical to SEQ ID NO: 5614
  Description of Artificial Sequence: Synthetic oligonucleotide
  Description of Combined DNA/RNA Molecule: Synthetic oligonucleotide

SEQ ID NO: 10824 - DNA, 46 bp, Artificial Sequence; identical to SEQ ID NO: 5615
  Description of Artificial Sequence: Synthetic oligonucleotide

SEQ ID NO: 10825 - DNA, 25 bp, Artificial Sequence
  Description of Artificial Sequence: Synthetic probe
aatatcgcaggtccacatggccacc

SEQ ID NO: 10826 - DNA, 19 bp, Artificial Sequence
  Description of Artificial Sequence: Synthetic primer
ttcgtgcgtcgtgtagcaa

SEQ ID NO: 10827 - DNA, 20 bp, Artificial Sequence
  Description of Artificial Sequence: Synthetic primer
tgggtgcagaaaatgggcaa

SEQ ID NO: 10828 - DNA, 45 bp, Artificial Sequence; identical to SEQ ID NO: 5619
  Description of Artificial Sequence: Synthetic primer
  Description of Combined DNA/RNA Molecule: Synthetic primer

SEQ ID NO: 10829 - DNA, 47 bp, Artificial Sequence; identical to SEQ ID NO: 5620
  Description of Artificial Sequence: Synthetic primer
  Description of Combined DNA/RNA Molecule: Synthetic primer

SEQ ID NO: 10830 - DNA, 46 bp, Artificial Sequence; identical to SEQ ID NO: 5621
  Description of Artificial Sequence: Synthetic primer
  Description of Combined DNA/RNA Molecule: Synthetic primer

SEQ ID NO: 10831 - DNA, 51 bp, Artificial Sequence; identical to SEQ ID NO: 5622
  Description of Artificial Sequence: Synthetic primer
  Description of Combined DNA/RNA Molecule: Synthetic primer

SEQ ID NO: 10832 - DNA, 47 bp, Artificial Sequence; identical to SEQ ID NO: 5623
  Description of Artificial Sequence: Synthetic oligonucleotide
  Description of Combined DNA/RNA Molecule: Synthetic oligonucleotide

SEQ ID NO: 10833 - DNA, 42 bp, Artificial Sequence; identical to SEQ ID NO: 5624
  Description of Artificial Sequence: Synthetic oligonucleotide

SEQ ID NO: 10834 - DNA, 23 bp, Artificial Sequence
  Description of Artificial Sequence: Synthetic probe
aactccgcacctgccagccagag

SEQ ID NO: 10835 - DNA, 19 bp, Artificial Sequence
  Description of Artificial Sequence: Synthetic primer
ttcgtgcgtcgtgtagcaa

SEQ ID NO: 10836 - DNA, 20 bp, Artificial Sequence
  Description of Artificial Sequence: Synthetic primer
tgggtgcagaaaatgggcaa

SEQ ID NO: 10837 - DNA, 49 bp, Artificial Sequence; identical to SEQ ID NO: 5628
  Description of Artificial Sequence: Synthetic primer
  Description of Combined DNA/RNA Molecule: Synthetic primer

SEQ ID NO: 10838 - DNA, 41 bp, Artificial Sequence; identical to SEQ ID NO: 5297
  Description of Artificial Sequence: Synthetic primer
  Description of Combined DNA/RNA Molecule: Synthetic primer

SEQ ID NO: 10839 - DNA, 43 bp, Artificial Sequence; identical to SEQ ID NO: 5684
  Description of Artificial Sequence: Synthetic primer
  Description of Combined DNA/RNA Molecule: Synthetic primer

SEQ ID NO: 10840 - DNA, 52 bp, Artificial Sequence; identical to SEQ ID NO: 5685
  Description of Artificial Sequence: Synthetic primer
  Description of Combined DNA/RNA Molecule: Synthetic primer

SEQ ID NO: 10841 - DNA, 48 bp, Artificial Sequence; identical to SEQ ID NO: 5686
  Description of Artificial Sequence: Synthetic oligonucleotide
  Description of Combined DNA/RNA Molecule: Synthetic oligonucleotide

SEQ ID NO: 10842 - DNA, 46 bp, Artificial Sequence; identical to SEQ ID NO: 5687
  Description of Artificial Sequence: Synthetic oligonucleotide

SEQ ID NO: 10843 - DNA, 23 bp, Artificial Sequence
  Description of Artificial Sequence: Synthetic probe
ccgaggtcaggagtcagcccacc

SEQ ID NO: 10844 - DNA, 22 bp, Artificial Sequence
  Description of Artificial Sequence: Synthetic primer
tgccctatcgaaaaggacaaca

SEQ ID NO: 10845 - DNA, 21 bp, Artificial Sequence
  Description of Artificial Sequence: Synthetic primer
tgtcatagacagccgcaaaca

SEQ ID NO: 10846 - DNA, 49 bp, Artificial Sequence; identical to SEQ ID NO: 5691
  Description of Artificial Sequence: Synthetic primer
  Description of Combined DNA/RNA Molecule: Synthetic primer

SEQ ID NO: 10847 - DNA, 39 bp, Artificial Sequence; identical to SEQ ID NO: 5817
  Description of Artificial Sequence: Synthetic primer
  Description of Combined DNA/RNA Molecule: Synthetic primer

SEQ ID NO: 10848 - DNA, 40 bp, Artificial Sequence; identical to SEQ ID NO: 5818
  Description of Artificial Sequence: Synthetic primer
  Description of Combined DNA/RNA Molecule: Synthetic primer

SEQ ID NO: 10849 - DNA, 54 bp, Artificial Sequence; identical to SEQ ID NO: 5819
  Description of Artificial Sequence: Synthetic primer
  Description of Combined DNA/RNA Molecule: Synthetic primer

SEQ ID NO: 10850 - DNA, 47 bp, Artificial Sequence; identical to SEQ ID NO: 5820
  Description of Artificial Sequence: Synthetic oligonucleotide
  Description of Combined DNA/RNA Molecule: Synthetic oligonucleotide

SEQ ID NO: 10851 - DNA, 42 bp, Artificial Sequence; identical to SEQ ID NO: 5821
  Description of Artificial Sequence: Synthetic oligonucleotide

SEQ ID NO: 10852 - DNA, 23 bp, Artificial Sequence
  Description of Artificial Sequence: Synthetic probe
aacaccgcaggaggccaaatccc

SEQ ID NO: 10853 - DNA, 19 bp, Artificial Sequence
  Description of Artificial Sequence: Synthetic primer
tcgcaacgtgccgaataca

SEQ ID NO: 10854 - DNA, 19 bp, Artificial Sequence
  Description of Artificial Sequence: Synthetic primer
ttagctcgaccgtgcaaca

SEQ ID NO: 10855 - DNA, 48 bp, Artificial Sequence; identical to SEQ ID NO: 5825
  Description of Artificial Sequence: Synthetic primer
  Description of Combined DNA/RNA Molecule: Synthetic primer

SEQ ID NO: 10856 - DNA, 40 bp, Artificial Sequence; identical to SEQ ID NO: 5967
  Description of Artificial Sequence: Synthetic primer
  Description of Combined DNA/RNA Molecule: Synthetic primer

SEQ ID NO: 10857 - DNA, 40 bp, Artificial Sequence; identical to SEQ ID NO: 5968
  Description of Artificial Sequence: Synthetic primer
  Description of Combined DNA/RNA Molecule: Synthetic primer

SEQ ID NO: 10858 - DNA, 55 bp, Artificial Sequence; identical to SEQ ID NO: 5969
  Description of Artificial Sequence: Synthetic primer
  Description of Combined DNA/RNA Molecule: Synthetic primer

SEQ ID NO: 10859 - DNA, 43 bp, Artificial Sequence; identical to SEQ ID NO: 5970
  Description of Artificial Sequence: Synthetic oligonucleotide
  Description of Combined DNA/RNA Molecule: Synthetic oligonucleotide

SEQ ID NO: 10860 - DNA, 46 bp, Artificial Sequence; identical to SEQ ID NO: 5971
  Description of Artificial Sequence: Synthetic oligonucleotide

SEQ ID NO: 10861 - DNA, 27 bp, Artificial Sequence
  Description of Artificial Sequence: Synthetic probe
tttgagacaacatggaggagatggcag

SEQ ID NO: 10862 - DNA, 21 bp, Artificial Sequence
  Description of Artificial Sequence: Synthetic primer
tccgactttagtgcgtcacaa

SEQ ID NO: 10863 - DNA, 20 bp, Artificial Sequence
  Description of Artificial Sequence: Synthetic primer
tatacgagcgagacccacaa

SEQ ID NO: 10864 - DNA, 48 bp, Artificial Sequence; identical to SEQ ID NO: 5975
  Description of Artificial Sequence: Synthetic primer
  Description of Combined DNA/RNA Molecule: Synthetic primer

SEQ ID NO: 10865 - DNA, 41 bp, Artificial Sequence; identical to SEQ ID NO: 6003
  Description of Artificial Sequence: Synthetic primer
  Description of Combined DNA/RNA Molecule: Synthetic primer

SEQ ID NO: 10866 - DNA, 41 bp, Artificial Sequence; identical to SEQ ID NO: 6004
  Description of Artificial Sequence: Synthetic primer
  Description of Combined DNA/RNA Molecule: Synthetic primer

SEQ ID NO: 10867 - DNA, 57 bp, Artificial Sequence; identical to SEQ ID NO: 6005
  Description of Artificial Sequence: Synthetic primer
  Description of Combined DNA/RNA Molecule: Synthetic primer

SEQ ID NO: 10868 - DNA, 47 bp, Artificial Sequence; identical to SEQ ID NO: 6006
  Description of Artificial Sequence: Synthetic oligonucleotide
  Description of Combined DNA/RNA Molecule: Synthetic oligonucleotide

SEQ ID NO: 10869 - DNA, 41 bp, Artificial Sequence; identical to SEQ ID NO: 6007
  Description of Artificial Sequence: Synthetic oligonucleotide

SEQ ID NO: 10870 - DNA, 21 bp, Artificial Sequence
  Description of Artificial Sequence: Synthetic probe
ttcaggccaccaggagccaag

SEQ ID NO: 10871 - DNA, 19 bp, Artificial Sequence
  Description of Artificial Sequence: Synthetic primer
tccggatcaaagcagccac

SEQ ID NO: 10872 - DNA, 19 bp, Artificial Sequence
  Description of Artificial Sequence: Synthetic primer
tcaccgtacgccaacacac

SEQ ID NO: 10873 - DNA, 50 bp, Artificial Sequence; identical to SEQ ID NO: 6011
  Description of Artificial Sequence: Synthetic primer
  Description of Combined DNA/RNA Molecule: Synthetic primer

SEQ ID NO: 10874 - DNA, 42 bp, Artificial Sequence; identical to SEQ ID NO: 6021
  Description of Artificial Sequence: Synthetic primer
  Description of Combined DNA/RNA Molecule: Synthetic primer

SEQ ID NO: 10875 - DNA, 42 bp, Artificial Sequence; identical to SEQ ID NO: 6022
  Description of Artificial Sequence: Synthetic primer
  Description of Combined DNA/RNA Molecule: Synthetic primer

SEQ ID NO: 10876 - DNA, 57 bp, Artificial Sequence; identical to SEQ ID NO: 6023
  Description of Artificial Sequence: Synthetic primer
  Description of Combined DNA/RNA Molecule: Synthetic primer

SEQ ID NO: 10877 - DNA, 50 bp, Artificial Sequence; identical to SEQ ID NO: 6024
  Description of Artificial Sequence: Synthetic oligonucleotide
  Description of Combined DNA/RNA Molecule: Synthetic oligonucleotide

SEQ ID NO: 10878 - DNA, 55 bp, Artificial Sequence; identical to SEQ ID NO: 6025
  Description of Artificial Sequence: Synthetic oligonucleotide

SEQ ID NO: 10879 - DNA, 26 bp, Artificial Sequence
  Description of Artificial Sequence: Synthetic probe
ttagtcgcacatatcagcagccaccc

SEQ ID NO: 10880 - DNA, 20 bp, Artificial Sequence
  Description of Artificial Sequence: Synthetic primer
tatgcggaccgatgactcaa

SEQ ID NO: 10881 - DNA, 22 bp, Artificial Sequence
  Description of Artificial Sequence: Synthetic primer
tcaggtagatcaagccaagcaa

SEQ ID NO: 10882 - DNA, 57 bp, Artificial Sequence; identical to SEQ ID NO: 6029
  Description of Artificial Sequence: Synthetic primer
  Description of Combined DNA/RNA Molecule: Synthetic primer

SEQ ID NO: 10883 - DNA, 40 bp, Artificial Sequence; identical to SEQ ID NO: 6272
  Description of Artificial Sequence: Synthetic primer
  Description of Combined DNA/RNA Molecule: Synthetic primer

SEQ ID NO: 10884 - DNA, 42 bp, Artificial Sequence; identical to SEQ ID NO: 6273
  Description of Artificial Sequence: Synthetic primer
  Description of Combined DNA/RNA Molecule: Synthetic primer

SEQ ID NO: 10885 - DNA, 48 bp, Artificial Sequence; identical to SEQ ID NO: 6274
  Description of Artificial Sequence: Synthetic primer
  Description of Combined DNA/RNA Molecule: Synthetic primer

SEQ ID NO: 10886 - DNA, 46 bp, Artificial Sequence; identical to SEQ ID NO: 6275
  Description of Artificial Sequence: Synthetic oligonucleotide
  Description of Combined DNA/RNA Molecule: Synthetic oligonucleotide

SEQ ID NO: 10887 - DNA, 48 bp, Artificial Sequence; identical to SEQ ID NO: 6276
  Description of Artificial Sequence: Synthetic oligonucleotide

SEQ ID NO: 10888 - DNA, 29 bp, Artificial Sequence
  Description of Artificial Sequence: Synthetic probe
aactgctcacccaccattcagttcagcat

SEQ ID NO: 10889 - DNA, 21 bp, Artificial Sequence
  Description of Artificial Sequence: Synthetic primer
tcatcgccctcagatcttcca

SEQ ID NO: 10890 - DNA, 21 bp, Artificial Sequence
  Description of Artificial Sequence: Synthetic primer
tgccctccaatctatcctcca

SEQ ID NO: 10891 - DNA, 45 bp, Artificial Sequence; identical to SEQ ID NO: 6280
  Description of Artificial Sequence: Synthetic primer
  Description of Combined DNA/RNA Molecule: Synthetic primer

SEQ ID NO: 10892 - DNA, 41 bp, Artificial Sequence; identical to SEQ ID NO: 8166
  Description of Artificial Sequence: Synthetic primer
  Description of Combined DNA/RNA Molecule: Synthetic primer

SEQ ID NO: 10893 - DNA, 39 bp, Artificial Sequence; identical to SEQ ID NO: 8167
  Description of Artificial Sequence: Synthetic primer
  Description of Combined DNA/RNA Molecule: Synthetic primer

SEQ ID NO: 10894 - DNA, 50 bp, Artificial Sequence; identical to SEQ ID NO: 8168
  Description of Artificial Sequence: Synthetic primer
  Description of Combined DNA/RNA Molecule: Synthetic primer

SEQ ID NO: 10895 - DNA, 51 bp, Artificial Sequence; identical to SEQ ID NO: 8169
  Description of Artificial Sequence: Synthetic oligonucleotide
  Description of Combined DNA/RNA Molecule: Synthetic oligonucleotide

SEQ ID NO: 10896 - DNA, 54 bp, Artificial Sequence; identical to SEQ ID NO: 8170
  Description of Artificial Sequence: Synthetic oligonucleotide

SEQ ID NO: 10897 - DNA, 34 bp, Artificial Sequence; identical to SEQ ID NO: 8171
  Description of Artificial Sequence: Synthetic probe

SEQ ID NO: 10898 - DNA, 22 bp, Artificial Sequence
  Description of Artificial Sequence: Synthetic primer
tggataaactaagtccgcccac

SEQ ID NO: 10899 - DNA, 21 bp, Artificial Sequence
  Description of Artificial Sequence: Synthetic primer
tgttagacgtcgctcagtcac

SEQ ID NO: 10900 - DNA, 47 bp, Artificial Sequence; identical to SEQ ID NO: 8174
  Description of Artificial Sequence: Synthetic primer
  Description of Combined DNA/RNA Molecule: Synthetic primer

SEQ ID NO: 10901 - DNA, 40 bp, Artificial Sequence
  Description of Artificial Sequence: Synthetic primer
  Description of Combined DNA/RNA Molecule: Synthetic primer
acgacgacgacgaattaaggcagcaggcaccagcaggcta

SEQ ID NO: 10902 - DNA, 42 bp, Artificial Sequence
  Description of Artificial Sequence: Synthetic primer
  Description of Combined DNA/RNA Molecule: Synthetic primer
acgacgacgacgaagggagttttaaggcagcaggcaccagcg

SEQ ID NO: 10903 - DNA, 52 bp, Artificial Sequence
  Description of Artificial Sequence: Synthetic primer
  Description of Combined DNA/RNA Molecule: Synthetic primer
acgacgacgacttgacgaacataatcatgcagctgtgcagtgtgtcagccac

SEQ ID NO: 10904 - DNA, 47 bp, Artificial Sequence
  Description of Artificial Sequence: Synthetic oligonucleotide
  Description of Combined DNA/RNA Molecule: Synthetic oligonucleotide
ttgcaacaggctaccgaccggctgatcctgaagcactgcccagagtt

SEQ ID NO: 10905 - DNA, 46 bp, Artificial Sequence
  Description of Artificial Sequence: Synthetic oligonucleotide
gagccagagcactactgcctggcacggtaggtaaggaagtcacgca

SEQ ID NO: 10906 - DNA, 26 bp, Artificial Sequence
  Description of Artificial Sequence: Synthetic probe
ttctgcccagagccagagcactactg

SEQ ID NO: 10907 - DNA, 19 bp, Artificial Sequence
  Description of Artificial Sequence: Synthetic primer
ttgcaacaggctaccgacc

SEQ ID NO: 10908 - DNA, 21 bp, Artificial Sequence
  Description of Artificial Sequence: Synthetic primer
tgcgtgacttccttacctacc

SEQ ID NO: 10909 - DNA, 49 bp, Artificial Sequence
  Description of Artificial Sequence: Synthetic primer
  Description of Combined DNA/RNA Molecule: Synthetic primer
tgcgtgacttccttacctaccgcagtgtgtcagccatcagctatgccaa

SEQ ID NO: 10910 - DNA, 39 bp, Artificial Sequence; identical to SEQ ID NO: 5817
  Description of Artificial Sequence: Synthetic primer
  Description of Combined DNA/RNA Molecule: Synthetic primer

SEQ ID NO: 10911 - DNA, 40 bp, Artificial Sequence; identical to SEQ ID NO: 5818
  Description of Artificial Sequence: Synthetic primer
  Description of Combined DNA/RNA Molecule: Synthetic primer

SEQ ID NO: 10912 - DNA, 52 bp, Artificial Sequence
  Description of Artificial Sequence: Synthetic primer
  Description of Combined DNA/RNA Molecule: Synthetic primer
acgacgacgacttgacgaacataatgagatgggcttcctgatgcccaggtct

SEQ ID NO: 10913 - DNA, 50 bp, Artificial Sequence
  Description of Artificial Sequence: Synthetic oligonucleotide
  Description of Combined DNA/RNA Molecule: Synthetic oligonucleotide
taagcctgcttttccgaaacaagcactgcacagaaggtcaccgcaggaaa

SEQ ID NO: 10914 - DNA, 44 bp, Artificial Sequence
  Description of Artificial Sequence: Synthetic oligonucleotide
ggaggccaaatccccagggagggttgtattgcgccaggatagca

SEQ ID NO: 10915 - DNA, 23 bp, Artificial Sequence
  Description of Artificial Sequence: Synthetic probe
aacaccgcaggaggccaaatccc

SEQ ID NO: 10916 - DNA, 22 bp, Artificial Sequence
  Description of Artificial Sequence: Synthetic primer
taagcctgcttttccgaaacaa

SEQ ID NO: 10917 - DNA, 21 bp, Artificial Sequence
  Description of Artificial Sequence: Synthetic primer
tgctatcctggcgcaatacaa

SEQ ID NO: 10918 - DNA, 46 bp, Artificial Sequence
  Description of Artificial Sequence: Synthetic primer
  Description of Combined DNA/RNA Molecule: Synthetic primer
tgctatcctggcgcaatacaaccaggtcctttcccctccttgggag

SEQ ID NO: 10919 - DNA, 40 bp, Artificial Sequence
  Description of Artificial Sequence: Synthetic primer
  Description of Combined DNA/RNA Molecule: Synthetic primer
acgacgacgacgaacaagccagtctcagccaggcactgct

SEQ ID NO: 10920 - DNA, 39 bp, Artificial Sequence
  Description of Artificial Sequence: Synthetic primer
  Description of Combined DNA/RNA Molecule: Synthetic primer
acgacgacgacgaaagtctcagccaggcactgccutcat

SEQ ID NO: 10921 - DNA, 59 bp, Artificial Sequence
  Description of Artificial Sequence: Synthetic primer
  Description of Combined DNA/RNA Molecule: Synthetic primer
acgacgacgacttgacgaacataattgtctgcagaaagagtggagtagagtggagtgga

SEQ ID NO: 10922 - DNA, 47 bp, Artificial Sequence
  Description of Artificial Sequence: Synthetic oligonucleotide
  Description of Combined DNA/RNA Molecule: Synthetic oligonucleotide
ttggcaactctccacccaacacacccaggagtgtcacatacaccatc

SEQ ID NO: 10923 - DNA, 45 bp, Artificial Sequence
  Description of Artificial Sequence: Synthetic oligonucleotide
ccactcacccccaggaaggaagccttgtattgcgccaggatagca

SEQ ID NO: 10924 - DNA, 25 bp, Artificial Sequence
  Description of Artificial Sequence: Synthetic probe
aaacatacaccactcacccccagga

SEQ ID NO: 10925 - DNA, 19 bp, Artificial Sequence
  Description of Artificial Sequence: Synthetic primer
ttggcaactctccacccaa

SEQ ID NO: 10926 - DNA, 21 bp, Artificial Sequence
  Description of Artificial Sequence: Synthetic primer
tgctatcctggcgcaatacaa

SEQ ID NO: 10927 - DNA, 49 bp, Artificial Sequence
  Description of Artificial Sequence: Synthetic primer
  Description of Combined DNA/RNA Molecule: Synthetic primer
tgctatcctggcgcaatacaaggagtagagtggagtgggtggatgagga

SEQ ID NO: 10928 - DNA, 45 bp, Artificial Sequence
  Description of Artificial Sequence: Synthetic primer
  Description of Combined DNA/RNA Molecule: Synthetic primer
acgacgacgacgaacttctccatctgcaccatgctcatcagcagc

SEQ ID NO: 10929 - DNA, 50 bp, Artificial Sequence
  Description of Artificial Sequence: Synthetic primer
  Description of Combined DNA/RNA Molecule: Synthetic primer
acgacgacgacgaacaacacagacaccaagaagatcttctccatcugcat

SEQ ID NO: 10930 - DNA, 50 bp, Artificial Sequence
  Description of Artificial Sequence: Synthetic primer
  Description of Combined DNA/RNA Molecule: Synthetic primer
acgacgacgacttgacgaacataatgggagtgggatggtgctgccugtga

SEQ ID NO: 10931 - DNA, 46 bp, Artificial Sequence
  Description of Artificial Sequence: Synthetic oligonucleotide
  Description of Combined DNA/RNA Molecule: Synthetic oligonucleotide
tcgacgaatctgctcagacaaagtgagcccagccacacgcauctct

SEQ ID NO: 10932 - DNA, 45 bp, Artificial Sequence
  Description of Artificial Sequence: Synthetic oligonucleotide
tcttcccagggccactcccagacttcttgaagcagcgtctgagca

SEQ ID NO: 10933 - DNA, 24 bp, Artificial Sequence
  Description of Artificial Sequence: Synthetic probe
ttacacgcatcttcccagggccac

SEQ ID NO: 10934 - DNA, 21 bp, Artificial Sequence
  Description of Artificial Sequence: Synthetic primer
tcgacgaatctgctcagacaa

SEQ ID NO: 10935 - DNA, 19 bp, Artificial Sequence
  Description of Artificial Sequence: Synthetic primer
tgctcagacgctgcttcaa

SEQ ID NO: 10936 - DNA, 45 bp, Artificial Sequence
  Description of Artificial Sequence: Synthetic primer
  Description of Combined DNA/RNA Molecule: Synthetic primer
tgctcagacgctgcttcaagagtgggatggtgctgcctatgggcg

SEQ ID NO: 10937 - DNA, 41 bp, Artificial Sequence
  Description of Artificial Sequence: Synthetic primer
  Description of Combined DNA/RNA Molecule: Synthetic primer
acgacgacgacgaacacagcatgcacagggtcctcaugcta

SEQ ID NO: 10938 - DNA, 40 bp, Artificial Sequence
  Description of Artificial Sequence: Synthetic primer
  Description of Combined DNA/RNA Molecule: Synthetic primer
acgacgacgacgaaccagagctcacagcatgcacagggtt

SEQ ID NO: 10939 - DNA, 51 bp, Artificial Sequence
  Description of Artificial Sequence: Synthetic primer
  Description of Combined DNA/RNA Molecule: Synthetic primer
acgacgacgacttgacgaacataatcatccctcccatgccctgtcaccctt

SEQ ID NO: 10940 - DNA, 61 bp, Artificial Sequence
  Description of Artificial Sequence: Synthetic oligonucleotide
  Description of Combined DNA/RNA Molecule: Synthetic oligonucleotide
tcgacgaatctgctcagacaactgctattaacatatttgcccatttgtaaagcgcaattcc

SEQ ID NO: 10941 - DNA, 58 bp, Artificial Sequence
  Description of Artificial Sequence: Synthetic oligonucleotide
attttaagggatggtgagttaaacaccactttttcagggttgaagcagcgtctgagca

SEQ ID NO: 10942 - DNA, 36 bp, Artificial Sequence
  Description of Artificial Sequence: Synthetic probe
ccaagcgcaattttaagggatggtgagttaaacacc

SEQ ID NO: 10943 - DNA, 21 bp, Artificial Sequence
  Description of Artificial Sequence: Synthetic primer
tcgacgaatctgctcagacaa

SEQ ID NO: 10944 - DNA, 19 bp, Artificial Sequence
  Description of Artificial Sequence: Synthetic primer
tgctcagacgctgcttcaa

SEQ ID NO: 10945 - DNA, 44 bp, Artificial Sequence
  Description of Artificial Sequence: Synthetic primer
  Description of Combined DNA/RNA Molecule: Synthetic primer
tgctcagacgctgcttcaacatgccctgtcaccctccttgaaag

SEQ ID NO: 10946 - DNA, 45 bp, Artificial Sequence
  Description of Artificial Sequence: Synthetic primer
  Description of Combined DNA/RNA Molecule: Synthetic primer
acgacgacgacgaaaatggcctctagtaaatccagagccagagct

SEQ ID NO: 10947 - DNA, 46 bp, Artificial Sequence
  Description of Artificial Sequence: Synthetic primer
  Description of Combined DNA/RNA Molecule: Synthetic primer
acgacgacgacgaaggcctctagtaaatccagagccagagccagcg

SEQ ID NO: 10948 - DNA, 50 bp, Artificial Sequence
  Description of Artificial Sequence: Synthetic primer
  Description of Combined DNA/RNA Molecule: Synthetic primer
acgacgacgacttgacgaacataatggtgctgctccttgggtggagggaa

SEQ ID NO: 10949 - DNA, 47 bp, Artificial Sequence
  Description of Artificial Sequence: Synthetic oligonucleotide
  Description of Combined DNA/RNA Molecule: Synthetic oligonucleotide
tttccgccgctacaaccaaagcaaagccacagagttgagacacactc

SEQ ID NO: 10950 - DNA, 42 bp, Artificial Sequence
  Description of Artificial Sequence: Synthetic oligonucleotide
cacctgggagagccaaggcccagttgaagcagcgtctgagca

SEQ ID NO: 10951 - DNA, 27 bp, Artificial Sequence
  Description of Artificial Sequence: Synthetic probe
aatgagacacacctgggagagccaagg

SEQ ID NO: 10952 - DNA, 19 bp, Artificial Sequence
  Description of Artificial Sequence: Synthetic primer
tttccgccgctacaaccaa

SEQ ID NO: 10953 - DNA, 19 bp, Artificial Sequence
  Description of Artificial Sequence: Synthetic primer
tgctcagacgctgcttcaa

SEQ ID NO: 10954 - DNA, 45 bp, Artificial Sequence
  Description of Artificial Sequence: Synthetic primer
  Description of Combined DNA/RNA Molecule: Synthetic primer
tgctcagacgctgcttcaacatgcacctgcatagcctgttgggat

SEQ ID NO: 10955 - DNA, 40 bp, Artificial Sequence
  Description of Artificial Sequence: Synthetic primer
  Description of Combined DNA/RNA Molecule: Synthetic primer
acgacgacgacgaacacaaggatgcacagtgcccagtgta

SEQ ID NO: 10956 - DNA, 40 bp, Artificial Sequence
  Description of Artificial Sequence: Synthetic primer
  Description of Combined DNA/RNA Molecule: Synthetic primer
acgacgacgacgaagatgcacagtgcccagtgtgcctggg

SEQ ID NO: 10957 - DNA, 55 bp, Artificial Sequence
  Description of Artificial Sequence: Synthetic primer
  Description of Combined DNA/RNA Molecule: Synthetic primer
acgacgacgacttgacgaacataatcctgtgtgctgtctgacttcttgcagaacc

SEQ ID NO: 10958 - DNA, 47 bp, Artificial Sequence
  Description of Artificial Sequence: Synthetic oligonucleotide
  Description of Combined DNA/RNA Molecule: Synthetic oligonucleotide
tcagtgaaaacacatccacccacctgcaggagccagtcaacaugggt

SEQ ID NO: 10959 - DNA, 43 bp, Artificial Sequence
  Description of Artificial Sequence: Synthetic oligonucleotide
tggactgcagccacagcttctgcctggtgagcagggatgagca

SEQ ID NO: 10960 - DNA, 29 bp, Artificial Sequence
  Description of Artificial Sequence: Synthetic probe
ttgtcaacatggactgcagccacagcttc

SEQ ID NO: 10961 - DNA, 22 bp, Artificial Sequence
  Description of Artificial Sequence: Synthetic primer
tcagtgaaaacacatccaccca

SEQ ID NO: 10962 - DNA, 19 bp, Artificial Sequence
  Description of Artificial Sequence: Synthetic primer
tgctcatccctgctcacca

SEQ ID NO: 10963 - DNA, 50 bp, Artificial Sequence
  Description of Artificial Sequence: Synthetic primer
  Description of Combined DNA/RNA Molecule: Synthetic primer
tgctcatccctgctcaccagtgctgtctgacttcttgcagaacctggagg

SEQ ID NO: 10964 - DNA, 37 bp, Artificial Sequence
  Description of Artificial Sequence: Synthetic primer
  Description of Combined DNA/RNA Molecule: Synthetic primer
acgacgacgacgaagggctgtgcagggctccagggat

SEQ ID NO: 10965 - DNA, 37 bp, Artificial Sequence
  Description of Artificial Sequence: Synthetic primer
  Description of Combined DNA/RNA Molecule: Synthetic primer
acgacgacgacgaaggaggctgtgcagggctccagga

SEQ ID NO: 10966 - DNA, 55 bp, Artificial Sequence
  Description of Artificial Sequence: Synthetic primer
  Description of Combined DNA/RNA Molecule: Synthetic primer
acgacgacgacttgacgaacataatgtgtgtgtaggctgtgtgtgtctgcutgtc

SEQ ID NO: 10967 - DNA, 46 bp, Artificial Sequence
  Description of Artificial Sequence: Synthetic oligonucleotide
  Description of Combined DNA/RNA Molecule: Synthetic oligonucleotide
ttgcacccgcgacataaccgccacactcacaccctgtgccacccgt

SEQ ID NO: 10968 - DNA, 47 bp, Artificial Sequence
  Description of Artificial Sequence: Synthetic oligonucleotide
cccacaggcagcacctacactgcagggtaattcactcgaacggagca

SEQ ID NO: 10969 - DNA, 21 bp, Artificial Sequence
  Description of Artificial Sequence: Synthetic probe
tttgtgccacccacaggcagc

SEQ ID NO: 10970 - DNA, 19 bp, Artificial Sequence
  Description of Artificial Sequence: Synthetic primer
ttgcacccgcgacataacc

SEQ ID NO: 10971 - DNA, 22 bp, Artificial Sequence
  Description of Artificial Sequence: Synthetic primer
tgctccgttcgagtgaattacc

SEQ ID NO: 10972 - DNA, 51 bp, Artificial Sequence
  Description of Artificial Sequence: Synthetic primer
  Description of Combined DNA/RNA Molecule: Synthetic primer
tgctccgttcgagtgaattacccttgttctcctctggctctgcaatgtaga

SEQ ID NO: 10973 - DNA, 47 bp, Artificial Sequence; identical to SEQ ID NO: 898
  Description of Artificial Sequence: Synthetic primer
  Description of Combined DNA/RNA Molecule: Synthetic primer

SEQ ID NO: 10974 - DNA, 45 bp, Artificial Sequence; identical to SEQ ID NO: 899
  Description of Artificial Sequence: Synthetic primer
  Description of Combined DNA/RNA Molecule: Synthetic primer

SEQ ID NO: 10975 - DNA, 50 bp, Artificial Sequence; identical to SEQ ID NO: 900
  Description of Artificial Sequence: Synthetic primer
  Description of Combined DNA/RNA Molecule: Synthetic primer

SEQ ID NO: 10976 - DNA, 56 bp, Artificial Sequence; identical to SEQ ID NO: 901
  Description of Artificial Sequence: Synthetic oligonucleotide
  Description of Combined DNA/RNA Molecule: Synthetic oligonucleotide

SEQ ID NO: 10977 - DNA, 55 bp, Artificial Sequence; identical to SEQ ID NO: 902
  Description of Artificial Sequence: Synthetic oligonucleotide

SEQ ID NO: 10978 - DNA, 31 bp, Artificial Sequence; identical to SEQ ID NO: 903
  Description of Artificial Sequence: Synthetic probe

SEQ ID NO: 10979 - DNA, 21 bp, Artificial Sequence
  Description of Artificial Sequence: Synthetic primer
tcaaacaaaggcgaccacaac

SEQ ID NO: 10980 - DNA, 22 bp, Artificial Sequence
  Description of Artificial Sequence: Synthetic primer
tatgaactgcctatgcgacaac

SEQ ID NO: 10981 - DNA, 25 bp, Artificial Sequence
  Description of Artificial Sequence: Synthetic primer
  Description of Combined DNA/RNA Molecule: Synthetic primer
acgacgacgacttgacgaacataac

SEQ ID NO: 10982 - DNA, 39 bp, Artificial Sequence; identical to SEQ ID NO: 1092
  Description of Artificial Sequence: Synthetic primer
  Description of Combined DNA/RNA Molecule: Synthetic primer

SEQ ID NO: 10983 - DNA, 36 bp, Artificial Sequence; identical to SEQ ID NO: 1093
  Description of Artificial Sequence: Synthetic primer
  Description of Combined DNA/RNA Molecule: Synthetic primer

SEQ ID NO: 10984 - DNA, 54 bp, Artificial Sequence; identical to SEQ ID NO: 1094
  Description of Artificial Sequence: Synthetic primer
  Description of Combined DNA/RNA Molecule: Synthetic primer

SEQ ID NO: 10985 - DNA, 47 bp, Artificial Sequence; identical to SEQ ID NO: 1095
  Description of Artificial Sequence: Synthetic oligonucleotide
  Description of Combined DNA/RNA Molecule: Synthetic oligonucleotide

SEQ ID NO: 10986 - DNA, 54 bp, Artificial Sequence; identical to SEQ ID NO: 1096
  Description of Artificial Sequence: Synthetic oligonucleotide

SEQ ID NO: 10987 - DNA, 35 bp, Artificial Sequence; identical to SEQ ID NO: 1097
  Description of Artificial Sequence: Synthetic probe

SEQ ID NO: 10988 - DNA, 22 bp, Artificial Sequence
  Description of Artificial Sequence: Synthetic primer
tcataatgttgtcagcccgacc

SEQ ID NO: 10989 - DNA, 19 bp, Artificial Sequence
  Description of Artificial Sequence: Synthetic primer
tcgctccatcaccaagacc

SEQ ID NO: 10990 - DNA, 52 bp, Artificial Sequence; identical to SEQ ID NO: 1100
  Description of Artificial Sequence: Synthetic primer
  Description of Combined DNA/RNA Molecule: Synthetic primer

SEQ ID NO: 10991 - DNA, 45 bp, Artificial Sequence; identical to SEQ ID NO: 1260
  Description of Artificial Sequence: Synthetic primer
  Description of Combined DNA/RNA Molecule: Synthetic primer

SEQ ID NO: 10992 - DNA, 46 bp, Artificial Sequence; identical to SEQ ID NO: 1261
  Description of Artificial Sequence: Synthetic primer
  Description of Combined DNA/RNA Molecule: Synthetic primer

SEQ ID NO: 10993 - DNA, 50 bp, Artificial Sequence; identical to SEQ ID NO: 1262
  Description of Artificial Sequence: Synthetic primer
  Description of Combined DNA/RNA Molecule: Synthetic primer

SEQ ID NO: 10994 - DNA, 44 bp, Artificial Sequence; identical to SEQ ID NO: 1263
  Description of Artificial Sequence: Synthetic oligonucleotide
  Description of Combined DNA/RNA Molecule: Synthetic oligonucleotide

SEQ ID NO: 10995 - DNA, 44 bp, Artificial Sequence; identical to SEQ ID NO: 1264
  Description of Artificial Sequence: Synthetic oligonucleotide

SEQ ID NO: 10996 - DNA, 25 bp, Artificial Sequence
  Description of Artificial Sequence: Synthetic probe
ttggctacatggtcctcagccagcc

SEQ ID NO: 10997 - DNA, 20 bp, Artificial Sequence
  Description of Artificial Sequence: Synthetic primer
ttcttcacagtaccgccaca

SEQ ID NO: 10998 - DNA, 19 bp, Artificial Sequence
  Description of Artificial Sequence: Synthetic primer
tgcaccaccagacaacaca

SEQ ID NO: 10999 - DNA, 43 bp, Artificial Sequence; identical to SEQ ID NO: 1268
  Description of Artificial Sequence: Synthetic primer
  Description of Combined DNA/RNA Molecule: Synthetic primer

SEQ ID NO: 11000 - DNA, 37 bp, Artificial Sequence; identical to SEQ ID NO: 3858
  Description of Artificial Sequence: Synthetic primer
  Description of Combined DNA/RNA Molecule: Synthetic primer

SEQ ID NO: 11001 - DNA, 39 bp, Artificial Sequence; identical to SEQ ID NO: 3859
  Description of Artificial Sequence: Synthetic primer
  Description of Combined DNA/RNA Molecule: Synthetic primer

SEQ ID NO: 11002 - DNA, 52 bp, Artificial Sequence; identical to SEQ ID NO: 3860
  Description of Artificial Sequence: Synthetic primer
  Description of Combined DNA/RNA Molecule: Synthetic primer

SEQ ID NO: 11003 - DNA, 47 bp, Artificial Sequence; identical to SEQ ID NO: 3861
  Description of Artificial Sequence: Synthetic oligonucleotide
  Description of Combined DNA/RNA Molecule: Synthetic oligonucleotide

SEQ ID NO: 11004 - DNA, 39 bp, Artificial Sequence; identical to SEQ ID NO: 3862
  Description of Artificial Sequence: Synthetic oligonucleotide

SEQ ID NO: 11005 - DNA, 23 bp, Artificial Sequence
  Description of Artificial Sequence: Synthetic probe
ttctgtccaccccacactgccag

SEQ ID NO: 11006 - DNA, 19 bp, Artificial Sequence
  Description of Artificial Sequence: Synthetic primer
tctgccagaacaccgacac

SEQ ID NO: 11007 - DNA, 19 bp, Artificial Sequence
  Description of Artificial Sequence: Synthetic primer
tcaccgtacgccaacacac

SEQ ID NO: 11008 - DNA, 45 bp, Artificial Sequence; identical to SEQ ID NO: 3866
  Description of Artificial Sequence: Synthetic primer
  Description of Combined DNA/RNA Molecule: Synthetic primer

SEQ ID NO: 11009 - DNA, 37 bp, Artificial Sequence; identical to SEQ ID NO: 5324
  Description of Artificial Sequence: Synthetic primer
  Description of Combined DNA/RNA Molecule: Synthetic primer

SEQ ID NO: 11010 - DNA, 39 bp, Artificial Sequence; identical to SEQ ID NO: 5325
  Description of Artificial Sequence: Synthetic primer
  Description of Combined DNA/RNA Molecule: Synthetic primer

SEQ ID NO: 11011 - DNA, 52 bp, Artificial Sequence; identical to SEQ ID NO: 5326
  Description of Artificial Sequence: Synthetic primer
  Description of Combined DNA/RNA Molecule: Synthetic primer

SEQ ID NO: 11012 - DNA, 42 bp, Artificial Sequence; identical to SEQ ID NO: 5327
  Description of Artificial Sequence: Synthetic oligonucleotide
  Description of Combined DNA/RNA Molecule: Synthetic oligonucleotide

SEQ ID NO: 11013 - DNA, 47 bp, Artificial Sequence; identical to SEQ ID NO: 5328
  Description of Artificial Sequence: Synthetic oligonucleotide

SEQ ID NO: 11014 - DNA, 26 bp, Artificial Sequence
  Description of Artificial Sequence: Synthetic probe
ttaggctcacacagcactgtctgcag

SEQ ID NO: 11015 - DNA, 19 bp, Artificial Sequence
  Description of Artificial Sequence: Synthetic primer
tgcttacccacgatgcacc

SEQ ID NO: 11016 - DNA, 20 bp, Artificial Sequence
  Description of Artificial Sequence: Synthetic primer
tgcgagcaagtcatacgacc

SEQ ID NO: 11017 - DNA, 56 bp, Artificial Sequence; identical to SEQ ID NO: 5332
  Description of Artificial Sequence: Synthetic primer
  Description of Combined DNA/RNA Molecule: Synthetic primer

SEQ ID NO: 11018 - DNA, 44 bp, Artificial Sequence; identical to SEQ ID NO: 5342
  Description of Artificial Sequence: Synthetic primer
  Description of Combined DNA/RNA Molecule: Synthetic primer

SEQ ID NO: 11019 - DNA, 49 bp, Artificial Sequence; identical to SEQ ID NO: 5343
  Description of Artificial Sequence: Synthetic primer
  Description of Combined DNA/RNA Molecule: Synthetic primer

SEQ ID NO: 11020 - DNA, 48 bp, Artificial Sequence; identical to SEQ ID NO: 5344
  Description of Artificial Sequence: Synthetic primer
  Description of Combined DNA/RNA Molecule: Synthetic primer

SEQ ID NO: 11021 - DNA, 44 bp, Artificial Sequence; identical to SEQ ID NO: 5345
  Description of Artificial Sequence: Synthetic oligonucleotide
  Description of Combined DNA/RNA Molecule: Synthetic oligonucleotide

SEQ ID NO: 11022 - DNA, 41 bp, Artificial Sequence; identical to SEQ ID NO: 5346
  Description of Artificial Sequence: Synthetic oligonucleotide

SEQ ID NO: 11023 - DNA, 25 bp, Artificial Sequence
  Description of Artificial Sequence: Synthetic probe
tttcctacagccagtgcctccacac

SEQ ID NO: 11024 - DNA, 19 bp, Artificial Sequence
  Description of Artificial Sequence: Synthetic primer
ttcgcctaccgcagtgaac

SEQ ID NO: 11025 - DNA, 19 bp, Artificial Sequence
  Description of Artificial Sequence: Synthetic primer
tgcgagcccatgtctcaac

SEQ ID NO: 11026 - DNA, 44 bp, Artificial Sequence; identical to SEQ ID NO: 5350
  Description of Artificial Sequence: Synthetic primer
  Description of Combined DNA/RNA Molecule: Synthetic primer

SEQ ID NO: 11027 - DNA, 40 bp, Artificial Sequence; identical to SEQ ID NO: 5396
  Description of Artificial Sequence: Synthetic primer
  Description of Combined DNA/RNA Molecule: Synthetic primer

SEQ ID NO: 11028 - DNA, 40 bp, Artificial Sequence; identical to SEQ ID NO: 5397
  Description of Artificial Sequence: Synthetic primer
  Description of Combined DNA/RNA Molecule: Synthetic primer

SEQ ID NO: 11029 - DNA, 50 bp, Artificial Sequence; identical to SEQ ID NO: 5398
  Description of Artificial Sequence: Synthetic primer
  Description of Combined DNA/RNA Molecule: Synthetic primer

SEQ ID NO: 11030 - DNA, 46 bp, Artificial Sequence; identical to SEQ ID NO: 5399
  Description of Artificial Sequence: Synthetic oligonucleotide
  Description of Combined DNA/RNA Molecule: Synthetic oligonucleotide

SEQ ID NO: 11031 - DNA, 43 bp, Artificial Sequence; identical to SEQ ID NO: 5400
  Description of Artificial Sequence: Synthetic oligonucleotide

SEQ ID NO: 11032 - DNA, 20 bp, Artificial Sequence
  Description of Artificial Sequence: Synthetic probe
ttcccaccaggagccagcac

SEQ ID NO: 11033 - DNA, 19 bp, Artificial Sequence
  Description of Artificial Sequence: Synthetic primer
ttgcaacaggctaccgacc

SEQ ID NO: 11034 - DNA, 21 bp, Artificial Sequence
  Description of Artificial Sequence: Synthetic primer
tgcgtgacttccttacctacc

SEQ ID NO: 11035 - DNA, 46 bp, Artificial Sequence; identical to SEQ ID NO: 5404
  Description of Artificial Sequence: Synthetic primer
  Description of Combined DNA/RNA Molecule: Synthetic primer

SEQ ID NO: 11036 - DNA, 38 bp, Artificial Sequence; identical to SEQ ID NO: 5424
  Description of Artificial Sequence: Synthetic primer
  Description of Combined DNA/RNA Molecule: Synthetic primer

SEQ ID NO: 11037 - DNA, 38 bp, Artificial Sequence; identical to SEQ ID NO: 5425
  Description of Artificial Sequence: Synthetic primer
  Description of Combined DNA/RNA Molecule: Synthetic primer

SEQ ID NO: 11038 - DNA, 55 bp, Artificial Sequence; identical to SEQ ID NO: 5426
  Description of Artificial Sequence: Synthetic primer
  Description of Combined DNA/RNA Molecule: Synthetic primer

SEQ ID NO: 11039 - DNA, 44 bp, Artificial Sequence; identical to SEQ ID NO: 5427
  Description of Artificial Sequence: Synthetic oligonucleotide
  Description of Combined DNA/RNA Molecule: Synthetic oligonucleotide

SEQ ID NO: 11040 - DNA, 44 bp, Artificial Sequence; identical to SEQ ID NO: 5428
  Description of Artificial Sequence: Synthetic oligonucleotide

SEQ ID NO: 11041 - DNA, 25 bp, Artificial Sequence
  Description of Artificial Sequence: Synthetic probe
aaggctacagtgggcagcatgtctg

SEQ ID NO: 11042 - DNA, 19 bp, Artificial Sequence
  Description of Artificial Sequence: Synthetic primer
tttccgccgctacaaccaa

SEQ ID NO: 11043 - DNA, 19 bp, Artificial Sequence
  Description of Artificial Sequence: Synthetic primer
tgctcagacgctgcttcaa

SEQ ID NO: 11044 - DNA, 45 bp, Artificial Sequence; identical to SEQ ID NO: 5432
  Description of Artificial Sequence: Synthetic primer
  Description of Combined DNA/RNA Molecule: Synthetic primer

SEQ ID NO: 11045 - DNA, 41 bp, Artificial Sequence; identical to SEQ ID NO: 5433
  Description of Artificial Sequence: Synthetic primer
  Description of Combined DNA/RNA Molecule: Synthetic primer

SEQ ID NO: 11046 - DNA, 42 bp, Artificial Sequence; identical to SEQ ID NO: 5434
  Description of Artificial Sequence: Synthetic primer
  Description of Combined DNA/RNA Molecule: Synthetic primer

SEQ ID NO: 11047 - DNA, 49 bp, Artificial Sequence; identical to SEQ ID NO: 5435
  Description of Artificial Sequence: Synthetic primer
  Description of Combined DNA/RNA Molecule: Synthetic primer

SEQ ID NO: 11048 - DNA, 43 bp, Artificial Sequence; identical to SEQ ID NO: 5436
  Description of Artificial Sequence: Synthetic oligonucleotide
  Description of Combined DNA/RNA Molecule: Synthetic oligonucleotide

SEQ ID NO: 11049 - DNA, 45 bp, Artificial Sequence; identical to SEQ ID NO: 5437
  Description of Artificial Sequence: Synthetic oligonucleotide

SEQ ID NO: 11050 - DNA, 22 bp, Artificial Sequence
  Description of Artificial Sequence: Synthetic probe
aagtggacaggcccagggcaca

SEQ ID NO: 11051 - DNA, 20 bp, Artificial Sequence
  Description of Artificial Sequence: Synthetic primer
tcgtagactcgctatcgcca

SEQ ID NO: 11052 - DNA, 19 bp, Artificial Sequence
  Description of Artificial Sequence: Synthetic primer
tgctcatccctgctcacca

SEQ ID NO: 11053 - DNA, 47 bp, Artificial Sequence; identical to SEQ ID NO: 5441
  Description of Artificial Sequence: Synthetic primer
  Description of Combined DNA/RNA Molecule: Synthetic primer

SEQ ID NO: 11054 - DNA, 40 bp, Artificial Sequence; identical to SEQ ID NO: 5460
  Description of Artificial Sequence: Synthetic primer
  Description of Combined DNA/RNA Molecule: Synthetic primer

SEQ ID NO: 11055 - DNA, 42 bp, Artificial Sequence; identical to SEQ ID NO: 5461
  Description of Artificial Sequence: Synthetic primer
  Description of Combined DNA/RNA Molecule: Synthetic primer

SEQ ID NO: 11056 - DNA, 47 bp, Artificial Sequence; identical to SEQ ID NO: 5462
  Description of Artificial Sequence: Synthetic primer
  Description of Combined DNA/RNA Molecule: Synthetic primer

SEQ ID NO: 11057 - DNA, 58 bp, Artificial Sequence; identical to SEQ ID NO: 5463
  Description of Artificial Sequence: Synthetic oligonucleotide
  Description of Combined DNA/RNA Molecule: Synthetic oligonucleotide

SEQ ID NO: 11058 - DNA, 51 bp, Artificial Sequence; identical to SEQ ID NO: 5464
  Description of Artificial Sequence: Synthetic oligonucleotide

SEQ ID NO: 11059 - DNA, 33 bp, Artificial Sequence; identical to SEQ ID NO: 5465
  Description of Artificial Sequence: Synthetic probe

SEQ ID NO: 11060 - DNA, 20 bp, Artificial Sequence
  Description of Artificial Sequence: Synthetic primer
tcgcggaaagtcccagtaac

SEQ ID NO: 11061 - DNA, 20 bp, Artificial Sequence
  Description of Artificial Sequence: Synthetic primer
tggaacgcttacaggccaac

SEQ ID NO: 11062 - DNA, 48 bp, Artificial Sequence; identical to SEQ ID NO: 5468
  Description of Artificial Sequence: Synthetic primer
  Description of Combined DNA/RNA Molecule: Synthetic primer

SEQ ID NO: 11063 - DNA, 42 bp, Artificial Sequence; identical to SEQ ID NO: 5647
  Description of Artificial Sequence: Synthetic primer
  Description of Combined DNA/RNA Molecule: Synthetic primer

SEQ ID NO: 11064 - DNA, 43 bp, Artificial Sequence; identical to SEQ ID NO: 5648
  Description of Artificial Sequence: Synthetic primer
  Description of Combined DNA/RNA Molecule: Synthetic primer

SEQ ID NO: 11065 - DNA, 52 bp, Artificial Sequence; identical to SEQ ID NO: 5649
  Description of Artificial Sequence: Synthetic primer
  Description of Combined DNA/RNA Molecule: Synthetic primer

SEQ ID NO: 11066 - DNA, 51 bp, Artificial Sequence; identical to SEQ ID NO: 5650
  Description of Artificial Sequence: Synthetic oligonucleotide
  Description of Combined DNA/RNA Molecule: Synthetic oligonucleotide

SEQ ID NO: 11067 - DNA, 45 bp, Artificial Sequence; identical to SEQ ID NO: 5651
  Description of Artificial Sequence: Synthetic oligonucleotide

SEQ ID NO: 11068 - DNA, 26 bp, Artificial Sequence
  Description of Artificial Sequence: Synthetic probe
aaacacccactgcaacccattcagac

SEQ ID NO: 11069 - DNA, 22 bp, Artificial Sequence
  Description of Artificial Sequence: Synthetic primer
tcttacgcccagggaatgtaac

SEQ ID NO: 11070 - DNA, 20 bp, Artificial Sequence
  Description of Artificial Sequence: Synthetic primer
tgtaaccacagccggacaac

SEQ ID NO: 11071 - DNA, 47 bp, Artificial Sequence; identical to SEQ ID NO: 5655
  Description of Artificial Sequence: Synthetic primer
  Description of Combined DNA/RNA Molecule: Synthetic primer

SEQ ID NO: 11072 - DNA, 49 bp, Artificial Sequence; identical to SEQ ID NO: 5860
  Description of Artificial Sequence: Synthetic primer
  Description of Combined DNA/RNA Molecule: Synthetic primer

SEQ ID NO: 11073 - DNA, 49 bp, Artificial Sequence; identical to SEQ ID NO: 5861
  Description of Artificial Sequence: Synthetic primer
  Description of Combined DNA/RNA Molecule: Synthetic primer

SEQ ID NO: 11074 - DNA, 53 bp, Artificial Sequence; identical to SEQ ID NO: 5862
  Description of Artificial Sequence: Synthetic primer
  Description of Combined DNA/RNA Molecule: Synthetic primer

SEQ ID NO: 11075 - DNA, 49 bp, Artificial Sequence; identical to SEQ ID NO: 5863
  Description of Artificial Sequence: Synthetic oligonucleotide
  Description of Combined DNA/RNA Molecule: Synthetic oligonucleotide

SEQ ID NO: 11076 - DNA, 42 bp, Artificial Sequence; identical to SEQ ID NO: 5864
  Description of Artificial Sequence: Synthetic oligonucleotide

SEQ ID NO: 11077 - DNA, 25 bp, Artificial Sequence
  Description of Artificial Sequence: Synthetic probe
aaaatgacactctgggagccctgcc

SEQ ID NO: 11078 - DNA, 21 bp, Artificial Sequence
  Description of Artificial Sequence: Synthetic primer
tcagacgcactaaacaggcaa

SEQ ID NO: 11079 - DNA, 19 bp, Artificial Sequence
  Description of Artificial Sequence: Synthetic primer
ttcacacgacgatccgcaa

SEQ ID NO: 11080 - DNA, 44 bp, Artificial Sequence; identical to SEQ ID NO: 5868
  Description of Artificial Sequence: Synthetic primer
  Description of Combined DNA/RNA Molecule: Synthetic primer

SEQ ID NO: 11081 - DNA, 35 bp, Artificial Sequence; identical to SEQ ID NO: 5877
  Description of Artificial Sequence: Synthetic primer
  Description of Combined DNA/RNA Molecule: Synthetic primer

SEQ ID NO: 11082 - DNA, 44 bp, Artificial Sequence; identical to SEQ ID NO: 5878
  Description of Artificial Sequence: Synthetic primer
  Description of Combined DNA/RNA Molecule: Synthetic primer

SEQ ID NO: 11083 - DNA, 58 bp, Artificial Sequence; identical to SEQ ID NO: 5879
  Description of Artificial Sequence: Synthetic primer
  Description of Combined DNA/RNA Molecule: Synthetic primer

SEQ ID NO: 11084 - DNA, 42 bp, Artificial Sequence; identical to SEQ ID NO: 5880
  Description of Artificial Sequence: Synthetic oligonucleotide
  Description of Combined DNA/RNA Molecule: Synthetic oligonucleotide

SEQ ID NO: 11085 - DNA, 57 bp, Artificial Sequence; identical to SEQ ID NO: 5881
  Description of Artificial Sequence: Synthetic oligonucleotide

SEQ ID NO: 11086 - DNA, 36 bp, Artificial Sequence; identical to SEQ ID NO: 5882
  Description of Artificial Sequence: Synthetic probe

SEQ ID NO: 11087 - DNA, 19 bp, Artificial Sequence
  Description of Artificial Sequence: Synthetic primer
tttcgctcgacgcatacca

SEQ ID NO: 11088 - DNA, 19 bp, Artificial Sequence
  Description of Artificial Sequence: Synthetic primer
ttttacagtagccgcgcca

SEQ ID NO: 11089 - DNA, 49 bp, Artificial Sequence; identical to SEQ ID NO: 5885
  Description of Artificial Sequence: Synthetic primer
  Description of Combined DNA/RNA Molecule: Synthetic primer

SEQ ID NO: 11090 - DNA, 50 bp, Artificial Sequence; identical to SEQ ID NO: 5913
  Description of Artificial Sequence: Synthetic primer
  Description of Combined DNA/RNA Molecule: Synthetic primer

SEQ ID NO: 11091 - DNA, 52 bp, Artificial Sequence; identical to SEQ ID NO: 5914
  Description of Artificial Sequence: Synthetic primer
  Description of Combined DNA/RNA Molecule: Synthetic primer

SEQ ID NO: 11092 - DNA, 57 bp, Artificial Sequence; identical to SEQ ID NO: 5915
  Description of Artificial Sequence: Synthetic primer
  Description of Combined DNA/RNA Molecule: Synthetic primer

SEQ ID NO: 11093 - DNA, 51 bp, Artificial Sequence; identical to SEQ ID NO: 5916
  Description of Artificial Sequence: Synthetic oligonucleotide
  Description of Combined DNA/RNA Molecule: Synthetic oligonucleotide

SEQ ID NO: 11094 - DNA, 54 bp, Artificial Sequence; identical to SEQ ID NO: 5917
  Description of Artificial Sequence: Synthetic oligonucleotide

SEQ ID NO: 11095 - DNA, 29 bp, Artificial Sequence
  Description of Artificial Sequence: Synthetic probe
cctgggacaggaggctacagagtcaggag

SEQ ID NO: 11096 - DNA, 19 bp, Artificial Sequence
  Description of Artificial Sequence: Synthetic primer
ttagccgccaaacgtacca

SEQ ID NO: 11097 - DNA, 20 bp, Artificial Sequence
  Description of Artificial Sequence: Synthetic primer
tactatcgtgttcctgccca

SEQ ID NO: 11098 - DNA, 57 bp, Artificial Sequence; identical to SEQ ID NO: 5921
  Description of Artificial Sequence: Synthetic primer
  Description of Combined DNA/RNA Molecule: Synthetic primer

SEQ ID NO: 11099 - DNA, 42 bp, Artificial Sequence; identical to SEQ ID NO: 5949
  Description of Artificial Sequence: Synthetic primer
  Description of Combined DNA/RNA Molecule: Synthetic primer

SEQ ID NO: 11100 - DNA, 44 bp, Artificial Sequence; identical to SEQ ID NO: 5950
  Description of Artificial Sequence: Synthetic primer
  Description of Combined DNA/RNA Molecule: Synthetic primer

SEQ ID NO: 11101 - DNA, 50 bp, Artificial Sequence; identical to SEQ ID NO: 5951
  Description of Artificial Sequence: Synthetic primer
  Description of Combined DNA/RNA Molecule: Synthetic primer

SEQ ID NO: 11102 - DNA, 52 bp, Artificial Sequence; identical to SEQ ID NO: 5952
  Description of Artificial Sequence: Synthetic oligonucleotide
  Description of Combined DNA/RNA Molecule: Synthetic oligonucleotide

SEQ ID NO: 11103 - DNA, 50 bp, Artificial Sequence; identical to SEQ ID NO: 5953
  Description of Artificial Sequence: Synthetic oligonucleotide

SEQ ID NO: 11104 - DNA, 33 bp, Artificial Sequence; identical to SEQ ID NO: 5954
  Description of Artificial Sequence: Synthetic probe

SEQ ID NO: 11105 - DNA, 22 bp, Artificial Sequence
  Description of Artificial Sequence: Synthetic primer
tccaaacaagctgatccgtaca

SEQ ID NO: 11106 - DNA, 19 bp, Artificial Sequence
  Description of Artificial Sequence: Synthetic primer
tagtaaccgctccgacaca

SEQ ID NO: 11107 - DNA, 45 bp, Artificial Sequence; identical to SEQ ID NO: 5957
  Description of Artificial Sequence: Synthetic primer
  Description of Combined DNA/RNA Molecule: Synthetic primer

SEQ ID NO: 11108 - DNA, 44 bp, Artificial Sequence; identical to SEQ ID NO: 5985
  Description of Artificial Sequence: Synthetic primer
  Description of Combined DNA/RNA Molecule: Synthetic primer

SEQ ID NO: 11109 - DNA, 40 bp, Artificial Sequence; identical to SEQ ID NO: 5986
  Description of Artificial Sequence: Synthetic primer
  Description of Combined DNA/RNA Molecule: Synthetic primer

SEQ ID NO: 11110 - DNA, 50 bp, Artificial Sequence; identical to SEQ ID NO: 5987
  Description of Artificial Sequence: Synthetic primer
  Description of Combined DNA/RNA Molecule: Synthetic primer

SEQ ID NO: 11111 - DNA, 44 bp, Artificial Sequence; identical to SEQ ID NO: 5988
  Description of Artificial Sequence: Synthetic oligonucleotide
  Description of Combined DNA/RNA Molecule: Synthetic oligonucleotide

SEQ ID NO: 11112 - DNA, 50 bp, Artificial Sequence; identical to SEQ ID NO: 5989
  Description of Artificial Sequence: Synthetic oligonucleotide

SEQ ID NO: 11113 - DNA, 27 bp, Artificial Sequence
  Description of Artificial Sequence: Synthetic probe
aaggcatcagcctcatctcagtgctgc

SEQ ID NO: 11114 - DNA, 22 bp, Artificial Sequence
  Description of Artificial Sequence: Synthetic primer
taaacaatgagacccgctgaac

SEQ ID NO: 11115 - DNA, 22 bp, Artificial Sequence
  Description of Artificial Sequence: Synthetic primer
tatgaactgcctatgcgacaac

SEQ ID NO: 11116 - DNA, 48 bp, Artificial Sequence; identical to SEQ ID NO: 5993
  Description of Artificial Sequence: Synthetic primer
  Description of Combined DNA/RNA Molecule: Synthetic primer

SEQ ID NO: 11117 - DNA, 51 bp, Artificial Sequence; identical to SEQ ID NO: 6110
  Description of Artificial Sequence: Synthetic primer
  Description of Combined DNA/RNA Molecule: Synthetic primer

SEQ ID NO: 11118 - DNA, 50 bp, Artificial Sequence; identical to SEQ ID NO: 6111
  Description of Artificial Sequence: Synthetic primer
  Description of Combined DNA/RNA Molecule: Synthetic primer

SEQ ID NO: 11119 - DNA, 50 bp, Artificial Sequence; identical to SEQ ID NO: 6112
  Description of Artificial Sequence: Synthetic primer
  Description of Combined DNA/RNA Molecule: Synthetic primer

SEQ ID NO: 11120 - DNA, 50 bp, Artificial Sequence; identical to SEQ ID NO: 6113
  Description of Artificial Sequence: Synthetic oligonucleotide
  Description of Combined DNA/RNA Molecule: Synthetic oligonucleotide

SEQ ID NO: 11121 - DNA, 47 bp, Artificial Sequence; identical to SEQ ID NO: 6114
  Description of Artificial Sequence: Synthetic oligonucleotide

SEQ ID NO: 11122 - DNA, 23 bp, Artificial Sequence
  Description of Artificial Sequence: Synthetic probe
aaccaggcatcccacacagcagt

SEQ ID NO: 11123 - DNA, 20 bp, Artificial Sequence
  Description of Artificial Sequence: Synthetic primer
tctacagctagatgcggcca

SEQ ID NO: 11124 - DNA, 20 bp, Artificial Sequence
  Description of Artificial Sequence: Synthetic primer
tcgacagagtaacggagcca

SEQ ID NO: 11125 - DNA, 45 bp, Artificial Sequence; identical to SEQ ID NO: 6118
  Description of Artificial Sequence: Synthetic primer
  Description of Combined DNA/RNA Molecule: Synthetic primer

SEQ ID NO: 11126 - DNA, 41 bp, Artificial Sequence; identical to SEQ ID NO: 7790
  Description of Artificial Sequence: Synthetic primer
  Description of Combined DNA/RNA Molecule: Synthetic primer

SEQ ID NO: 11127 - DNA, 42 bp, Artificial Sequence; identical to SEQ ID NO: 7791
  Description of Artificial Sequence: Synthetic primer
  Description of Combined DNA/RNA Molecule: Synthetic primer

SEQ ID NO: 11128 - DNA, 52 bp, Artificial Sequence; identical to SEQ ID NO: 7792
  Description of Artificial Sequence: Synthetic primer
  Description of Combined DNA/RNA Molecule: Synthetic primer

SEQ ID NO: 11129 - DNA, 46 bp, Artificial Sequence; identical to SEQ ID NO: 7793
  Description of Artificial Sequence: Synthetic oligonucleotide
  Description of Combined DNA/RNA Molecule: Synthetic oligonucleotide

SEQ ID NO: 11130 - DNA, 39 bp, Artificial Sequence; identical to SEQ ID NO: 7794
  Description of Artificial Sequence: Synthetic oligonucleotide

SEQ ID NO: 11131 - DNA, 22 bp, Artificial Sequence
  Description of Artificial Sequence: Synthetic probe
ttagcaacatgggcagcccagc

SEQ ID NO: 11132 - DNA, 20 bp, Artificial Sequence
  Description of Artificial Sequence: Synthetic primer
tgctatgccgcattcaacca

SEQ ID NO: 11133 - DNA, 19 bp, Artificial Sequence
  Description of Artificial Sequence: Synthetic primer
tgtcgccgaactagctcca

SEQ ID NO: 11134 - DNA, 44 bp, Artificial Sequence; identical to SEQ ID NO: 7798
  Description of Artificial Sequence: Synthetic primer
  Description of Combined DNA/RNA Molecule: Synthetic primer

SEQ ID NO: 11135 - DNA, 49 bp, Artificial Sequence; identical to SEQ ID NO: 10346
  Description of Artificial Sequence: Synthetic primer
  Description of Combined DNA/RNA Molecule: Synthetic primer

SEQ ID NO: 11136 - DNA, 51 bp, Artificial Sequence; identical to SEQ ID NO: 10347
  Description of Artificial Sequence: Synthetic primer
  Description of Combined DNA/RNA Molecule: Synthetic primer

SEQ ID NO: 11137 - DNA, 48 bp, Artificial Sequence; identical to SEQ ID NO: 10348
  Description of Artificial Sequence: Synthetic primer
  Description of Combined DNA/RNA Molecule: Synthetic primer

SEQ ID NO: 11138 - DNA, 49 bp, Artificial Sequence; identical to SEQ ID NO: 10349
  Description of Artificial Sequence: Synthetic oligonucleotide
  Description of Combined DNA/RNA Molecule: Synthetic oligonucleotide

SEQ ID NO: 11139 - DNA, 47 bp, Artificial Sequence; identical to SEQ ID NO: 10350
  Description of Artificial Sequence: Synthetic oligonucleotide

SEQ ID NO: 11140 - DNA, 27 bp, Artificial Sequence
  Description of Artificial Sequence: Synthetic probe
cctggatcagctgagctgcttcaccac

SEQ ID NO: 11141 - DNA, 19 bp, Artificial Sequence
  Description of Artificial Sequence: Synthetic primer
ttacaggccgcatagcaac

SEQ ID NO: 11142 - DNA, 19 bp, Artificial Sequence
  Description of Artificial Sequence: Synthetic primer
tgcgagcccatgtctcaac

SEQ ID NO: 11143 - DNA, 39 bp, Artificial Sequence
  Description of Artificial Sequence: Synthetic primer
  Description of Combined DNA/RNA Molecule: Synthetic primer
acgacgacgacgaagacccagcagagagggctcaggtgg

SEQ ID NO: 11144 - DNA, 40 bp, Artificial Sequence
  Description of Artificial Sequence: Synthetic primer
  Description of Combined DNA/RNA Molecule: Synthetic primer
acgacgacgacgaacagcagagagggctcaggtgaggcac

SEQ ID NO: 11145 - DNA, 51 bp, Artificial Sequence
  Description of Artificial Sequence: Synthetic primer
  Description of Combined DNA/RNA Molecule: Synthetic primer
acgacgacgacttgacgaacataatgtgctgctgtgcccacatggacaggc

SEQ ID NO: 11146 - DNA, 44 bp, Artificial Sequence
  Description of Artificial Sequence: Synthetic oligonucleotide
  Description of Combined DNA/RNA Molecule: Synthetic oligonucleotide
tccggcctttgacgataccggaggcactgaatgggaccaggaat

SEQ ID NO: 11147 - DNA, 45 bp, Artificial Sequence
  Description of Artificial Sequence: Synthetic oligonucleotide
ggagccacaggacccacagagggggtaattcactcgaacggagca

SEQ ID NO: 11148 - DNA, 23 bp, Artificial Sequence
  Description of Artificial Sequence: Synthetic probe
ccgggaccaggagccacaggacc

SEQ ID NO: 11149 - DNA, 19 bp, Artificial Sequence
  Description of Artificial Sequence: Synthetic primer
tccggcctttgacgatacc

SEQ ID NO: 11150 - DNA, 22 bp, Artificial Sequence
  Description of Artificial Sequence: Synthetic primer
tgctccgttcgagtgaattacc

SEQ ID NO: 11151 - DNA, 49 bp, Artificial Sequence
  Description of Artificial Sequence: Synthetic primer
  Description of Combined DNA/RNA Molecule: Synthetic primer
tgctccgttcgagtgaattacccacatggacaggtgccctctatgggtt

SEQ ID NO: 11152 - DNA, 44 bp, Artificial Sequence
  Description of Artificial Sequence: Synthetic primer
  Description of Combined DNA/RNA Molecule: Synthetic primer
acgacgacgacgaagagactcacagggctttttccagcactacg

SEQ ID NO: 11153 - DNA, 41 bp, Artificial Sequence
  Description of Artificial Sequence: Synthetic primer
  Description of Combined DNA/RNA Molecule: Synthetic primer
acgacgacgacgaacaccaccagagactcacagggcutttc

SEQ ID NO: 11154 - DNA, 54 bp, Artificial Sequence
  Description of Artificial Sequence: Synthetic primer
  Description of Combined DNA/RNA Molecule: Synthetic primer
acgacgacgacttgacgaacataatggaagaggaccatctttaggctgtugttt

SEQ ID NO: 11155 - DNA, 51 bp, Artificial Sequence
  Description of Artificial Sequence: Synthetic oligonucleotide
  Description of Combined DNA/RNA Molecule: Synthetic oligonucleotide
tccggcctttgacgatacctacattcattaggcagcagggtgagcaggaag

SEQ ID NO: 11156 - DNA, 52 bp, Artificial Sequence
  Description of Artificial Sequence: Synthetic oligonucleotide
ggagagacctgccagcaactttccttccagggtaattcactcgaacggagca

SEQ ID NO: 11157 - DNA, 25 bp, Artificial Sequence
  Description of Artificial Sequence: Synthetic probe
ttgtgagcaggagagacctgccagc

SEQ ID NO: 11158 - DNA, 19 bp, Artificial Sequence
  Description of Artificial Sequence: Synthetic primer
tccggcctttgacgatacc

SEQ ID NO: 11159 - DNA, 22 bp, Artificial Sequence
  Description of Artificial Sequence: Synthetic primer
tgctccgttcgagtgaattacc

SEQ ID NO: 11160 - DNA, 52 bp, Artificial Sequence
  Description of Artificial Sequence: Synthetic primer
  Description of Combined DNA/RNA Molecule: Synthetic primer
tgctccgttcgagtgaattaccggaagaggaccatctttaggctgctgttcg

SEQ ID NO: 11161 - DNA, 40 bp, Artificial Sequence
  Description of Artificial Sequence: Synthetic primer
  Description of Combined DNA/RNA Molecule: Synthetic primer
acgacgacgacgaaacactccacagccaatggccaggcaa

SEQ ID NO: 11162 - DNA, 42 bp, Artificial Sequence
  Description of Artificial Sequence: Synthetic primer
  Description of Combined DNA/RNA Molecule: Synthetic primer
acgacgacgacgaaccattcccacactccacagccaauggct

SEQ ID NO: 11163 - DNA, 49 bp, Artificial Sequence
  Description of Artificial Sequence: Synthetic primer
  Description of Combined DNA/RNA Molecule: Synthetic primer
acgacgacgacttgacgaacataatgctccttgaggagtgcccautgta

SEQ ID NO: 11164 - DNA, 46 bp, Artificial Sequence
  Description of Artificial Sequence: Synthetic oligonucleotide
  Description of Combined DNA/RNA Molecule: Synthetic oligonucleotide
tgaacgctcaaacacgtgaaccaggccacacaaaggcatcagcctg

SEQ ID NO: 11165 - DNA, 55 bp, Artificial Sequence
  Description of Artificial Sequence: Synthetic oligonucleotide
gcccattagcacacactaaattgcctgtgaattgggttggcctgtaagcgttcca

SEQ ID NO: 11166 - DNA, 33 bp, Artificial Sequence
  Description of Artificial Sequence: Synthetic probe
ttggcatcagcccattagcacacactaaattgc

SEQ ID NO: 11167 - DNA, 21 bp, Artificial Sequence
  Description of Artificial Sequence: Synthetic primer
tgaacgctcaaacacgtgaac

SEQ ID NO: 11168 - DNA, 20 bp, Artificial Sequence
  Description of Artificial Sequence: Synthetic primer
tggaacgcttacaggccaac

SEQ ID NO: 11169 - DNA, 45 bp, Artificial Sequence
  Description of Artificial Sequence: Synthetic primer
  Description of Combined DNA/RNA Molecule: Synthetic primer
tggaacgcttacaggccaacggagtgcccattgtgcctatgccag

SEQ ID NO: 11170 - DNA, 38 bp, Artificial Sequence
  Description of Artificial Sequence: Synthetic primer
  Description of Combined DNA/RNA Molecule: Synthetic primer
acgacgacgacgaaccccaaaaggctgcagccagggat

SEQ ID NO: 11171 - DNA, 42 bp, Artificial Sequence
  Description of Artificial Sequence: Synthetic primer
  Description of Combined DNA/RNA Molecule: Synthetic primer
acgacgacgacgaaggtcagacaggtccccaaaaggcugcaa

SEQ ID NO: 11172 - DNA, 52 bp, Artificial Sequence
  Description of Artificial Sequence: Synthetic primer
  Description of Combined DNA/RNA Molecule: Synthetic primer
acgacgacgacttgacgaacataatctcacctgcaatgtgcttggccuttgt

SEQ ID NO: 11173 - DNA, 46 bp, Artificial Sequence
  Description of Artificial Sequence: Synthetic oligonucleotide
  Description of Combined DNA/RNA Molecule: Synthetic oligonucleotide
tacacgtggatatctccgacccaaccatggtggccacaacaatgag

SEQ ID NO: 11174 - DNA, 55 bp, Artificial Sequence
  Description of Artificial Sequence: Synthetic oligonucleotide
atggaagatgaccaggtagtagccacactccaggggtgctagtcacacagttcca

SEQ ID NO: 11175 - DNA, 34 bp, Artificial Sequence
  Description of Artificial Sequence: Synthetic probe
ttcacaacaatggaagatgaccaggtagtagcca

SEQ ID NO: 11176 - DNA, 21 bp, Artificial Sequence
  Description of Artificial Sequence: Synthetic primer
tacacgtggatatctccgacc

SEQ ID NO: 11177 - DNA, 21 bp, Artificial Sequence
  Description of Artificial Sequence: Synthetic primer
tggaactgtgtgactagcacc

SEQ ID NO: 11178 - DNA, 48 bp, Artificial Sequence
  Description of Artificial Sequence: Synthetic primer
  Description of Combined DNA/RNA Molecule: Synthetic primer
tggaactgtgtgactagcaccctttgcttgcttgccctggaatgtggt

SEQ ID NO: 11179 - DNA, 44 bp, Artificial Sequence
  Description of Artificial Sequence: Synthetic primer
  Description of Combined DNA/RNA Molecule: Synthetic primer
acgacgacgacgaacacctcctcatgtaacccaactccauaaac

SEQ ID NO: 11180 - DNA, 49 bp, Artificial Sequence
  Description of Artificial Sequence: Synthetic primer
  Description of Combined DNA/RNA Molecule: Synthetic primer
acgacgacgacgaaacctcctcatgtaacccaactccataaatcuctgt

SEQ ID NO: 11181 - DNA, 49 bp, Artificial Sequence
  Description of Artificial Sequence: Synthetic primer
  Description of Combined DNA/RNA Molecule: Synthetic primer
acgacgacgacttgacgaacataatccctcctgagcctgcaggaggcaa

SEQ ID NO: 11182 - DNA, 44 bp, Artificial Sequence
  Description of Artificial Sequence: Synthetic oligonucleotide
  Description of Combined DNA/RNA Molecule: Synthetic oligonucleotide
tagcattcgagaacgcacctccccaccacaccctccccacccct

SEQ ID NO: 11183 - DNA, 45 bp, Artificial Sequence
  Description of Artificial Sequence: Synthetic oligonucleotide
ccctcacactcacccttggtggccggtgctagtcacacagttcca

SEQ ID NO: 11184 - DNA, 24 bp, Artificial Sequence
  Description of Artificial Sequence: Synthetic probe
ttctccccaccctcacactcaccc

SEQ ID NO: 11185 - DNA, 19 bp, Artificial Sequence
  Description of Artificial Sequence: Synthetic primer
tagcattcgagaacgcacc

SEQ ID NO: 11186 - DNA, 21 bp, Artificial Sequence
  Description of Artificial Sequence: Synthetic primer
tggaactgtgtgactagcacc

SEQ ID NO: 11187 - DNA, 39 bp, Artificial Sequence
  Description of Artificial Sequence: Synthetic primer
  Description of Combined DNA/RNA Molecule: Synthetic primer
acgacgacgacgaacccacacctcctgctccacagcccg

SEQ ID NO: 11188 - DNA, 38 bp, Artificial Sequence
  Description of Artificial Sequence: Synthetic primer
  Description of Combined DNA/RNA Molecule: Synthetic primer
acgacgacgacgaagcaccagggcccacacctcctgcc

SEQ ID NO: 11189 - DNA, 55 bp, Artificial Sequence
  Description of Artificial Sequence: Synthetic primer
  Description of Combined DNA/RNA Molecule: Synthetic primer
acgacgacgacttgacgaacataatccccttaatcctgctctcttgggaagctgc

SEQ ID NO: 11190 - DNA, 43 bp, Artificial Sequence
  Description of Artificial Sequence: Synthetic oligonucleotide
  Description of Combined DNA/RNA Molecule: Synthetic oligonucleotide
taaccgggcctaaagtgacacccaccaccaccagctcagggtc

SEQ ID NO: 11191 - DNA, 47 bp, Artificial Sequence
  Description of Artificial Sequence: Synthetic oligonucleotide
gggctgacctctcagagcagggcagtgttacgtgatctccctctcca

SEQ ID NO: 11192 - DNA, 27 bp, Artificial Sequence
  Description of Artificial Sequence: Synthetic probe
ttcagctcagggctgacctctcagagc

SEQ ID NO: 11193 - DNA, 20 bp, Artificial Sequence
  Description of Artificial Sequence: Synthetic primer
taaccgggcctaaagtgaca

SEQ ID NO: 11194 - DNA, 22 bp, Artificial Sequence
  Description of Artificial Sequence: Synthetic primer
tggagagggagatcacgtaaca

SEQ ID NO: 11195 - DNA, 53 bp, Artificial Sequence
  Description of Artificial Sequence: Synthetic primer
  Description of Combined DNA/RNA Molecule: Synthetic primer
tggagagggagatcacgtaacagggaagctgtgctgtgaaaatcctttgcccc

SEQ ID NO: 11196 - DNA, 39 bp, Artificial Sequence
  Description of Artificial Sequence: Synthetic primer
  Description of Combined DNA/RNA Molecule: Synthetic primer
acgacgacgacgaagttcagggagggcaaggccaugcct

SEQ ID NO: 11197 - DNA, 37 bp, Artificial Sequence
  Description of Artificial Sequence: Synthetic primer
  Description of Combined DNA/RNA Molecule: Synthetic primer
acgacgacgacgaaggagggcaaggccatgccccacg

SEQ ID NO: 11198 - DNA, 54 bp, Artificial Sequence
  Description of Artificial Sequence: Synthetic primer
  Description of Combined DNA/RNA Molecule: Synthetic primer
acgacgacgacttgacgaacataatcttcctctctggtcctggtgtggauggta

SEQ ID NO: 11199 - DNA, 46 bp, Artificial Sequence
  Description of Artificial Sequence: Synthetic oligonucleotide
  Description of Combined DNA/RNA Molecule: Synthetic oligonucleotide
tcgatggtcaatgagcttcacaatccaggcagcacaggtcacagat

SEQ ID NO: 11200 - DNA, 48 bp, Artificial Sequence
  Description of Artificial Sequence: Synthetic oligonucleotide
caggccactcccctagccaggaagagtgttacgtgatctccctctcca

SEQ ID NO: 11201 - DNA, 25 bp, Artificial Sequence
  Description of Artificial Sequence: Synthetic probe
ttcaggtcacaggccactcccctag

SEQ ID NO: 11202 - DNA, 22 bp, Artificial Sequence
  Description of Artificial Sequence: Synthetic primer
tcgatggtcaatgagcttcaca

SEQ ID NO: 11203 - DNA, 22 bp, Artificial Sequence
  Description of Artificial Sequence: Synthetic primer
tggagagggagatcacgtaaca

SEQ ID NO: 11204 - DNA, 51 bp, Artificial Sequence
  Description of Artificial Sequence: Synthetic primer
  Description of Combined DNA/RNA Molecule: Synthetic primer
tggagagggagatcacgtaacactctctggtcctggtgtggatgatggctt

SEQ ID NO: 11205 - DNA, 52 bp, Artificial Sequence
  Description of Artificial Sequence: Synthetic primer
  Description of Combined DNA/RNA Molecule: Synthetic primer
acgacgacgacgaaccctttcttttctcagaatgattcttcaaggcaaatgg

SEQ ID NO: 11206 - DNA, 52 bp, Artificial Sequence
  Description of Artificial Sequence: Synthetic primer
  Description of Combined DNA/RNA Molecule: Synthetic primer
acgacgacgacgaacctttcttttctcagaatgattcttcaaggcaaatgat

SEQ ID NO: 11207 - DNA, 55 bp, Artificial Sequence
  Description of Artificial Sequence: Synthetic primer
  Description of Combined DNA/RNA Molecule: Synthetic primer
acgacgacgacttgacgaacataatgagagcccacttgcacatctgactggaaat

SEQ ID NO: 11208 - DNA, 60 bp, Artificial Sequence
  Description of Artificial Sequence: Synthetic oligonucleotide
  Description of Combined DNA/RNA Molecule: Synthetic oligonucleotide
tctcgggaccacaatacgaacatgactcaaaatggagatttcttctaacaccgcaugact

SEQ ID NO: 11209 - DNA, 55 bp, Artificial Sequence
  Description of Artificial Sequence: Synthetic oligonucleotide
tgatcaccaacaacttttgcaggacaggatgaaacgttacgctaagctggtgcca

SEQ ID NO: 11210 - DNA, 31 bp, Artificial Sequence
  Description of Artificial Sequence: Synthetic probe
ttcaccgcatgatcaccaacaacttttgcag

SEQ ID NO: 11211 - DNA, 21 bp, Artificial Sequence
  Description of Artificial Sequence: Synthetic primer
tctcgggaccacaatacgaac

SEQ ID NO: 11212 - DNA, 20 bp, Artificial Sequence
  Description of Artificial Sequence: Synthetic primer
tggcaccagcttagcgtaac

SEQ ID NO: 11213 - DNA, 51 bp, Artificial Sequence
  Description of Artificial Sequence: Synthetic primer
  Description of Combined DNA/RNA Molecule: Synthetic primer
tggcaccagcttagcgtaacctggaaacccagaggagtttcatcttgtccc

SEQ ID NO: 11214 - DNA, 38 bp, Artificial Sequence
  Description of Artificial Sequence: Synthetic primer
  Description of Combined DNA/RNA Molecule: Synthetic primer
acgacgacgacgaacactgggcacacacccacacccat

SEQ ID NO: 11215 - DNA, 38 bp, Artificial Sequence
  Description of Artificial Sequence: Synthetic primer
  Description of Combined DNA/RNA Molecule: Synthetic primer
acgacgacgacgaacagccagcactgggcacacacccg

SEQ ID NO: 11216 - DNA, 51 bp, Artificial Sequence
  Description of Artificial Sequence: Synthetic primer
  Description of Combined DNA/RNA Molecule: Synthetic primer
acgacgacgacttgacgaacataatgctggcatggagagcctgtgagtgta

SEQ ID NO: 11217 - DNA, 44 bp, Artificial Sequence
  Description of Artificial Sequence: Synthetic oligonucleotide
  Description of Combined DNA/RNA Molecule: Synthetic oligonucleotide
ttgctgtgcgcggtagaaccccacacagcccaaaggacaccatg

SEQ ID NO: 11218 - DNA, 48 bp, Artificial Sequence
  Description of Artificial Sequence: Synthetic oligonucleotide
ccacacaacccacaagaacaccagctccgttacgctaagctggtgcca

SEQ ID NO: 11219 - DNA, 30 bp, Artificial Sequence
  Description of Artificial Sequence: Synthetic probe
ttaaggacaccacacaacccacaagaacac

SEQ ID NO: 11220 - DNA, 19 bp, Artificial Sequence
  Description of Artificial Sequence: Synthetic primer
ttgctgtgcgcggtagaac

SEQ ID NO: 11221 - DNA, 20 bp, Artificial Sequence
  Description of Artificial Sequence: Synthetic primer
tggcaccagcttagcgtaac

SEQ ID NO: 11222 - DNA, 47 bp, Artificial Sequence
  Description of Artificial Sequence: Synthetic primer
  Description of Combined DNA/RNA Molecule: Synthetic primer
tggcaccagcttagcgtaacggcatggagagcctgtgagtatgggac

SEQ ID NO: 11223 - DNA, 48 bp, Artificial Sequence
  Description of Artificial Sequence: Synthetic primer
  Description of Combined DNA/RNA Molecule: Synthetic primer
acgacgacgacgaaggtccacacctgaaagtaattgagtctcagcata

SEQ ID NO: 11224 - DNA, 43 bp, Artificial Sequence
  Description of Artificial Sequence: Synthetic primer
  Description of Combined DNA/RNA Molecule: Synthetic primer
acgacgacgacgaattgcctcctgccccagaagatttautttg

SEQ ID NO: 11225 - DNA, 50 bp, Artificial Sequence
  Description of Artificial Sequence: Synthetic primer
  Description of Combined DNA/RNA Molecule: Synthetic primer
acgacgacgacttgacgaacataatggagctgagagctgctgccactgcc

SEQ ID NO: 11226 - DNA, 44 bp, Artificial Sequence
  Description of Artificial Sequence: Synthetic oligonucleotide
  Description of Combined DNA/RNA Molecule: Synthetic oligonucleotide
tctcgattacgctccgcacgcatgggtgcagggactacagagaa

SEQ ID NO: 11227 - DNA, 45 bp, Artificial Sequence
  Description of Artificial Sequence: Synthetic oligonucleotide
gagggagggtccaggcacagcaggtgtgtagcttagacatggcca

SEQ ID NO: 11228 - DNA, 25 bp, Artificial Sequence
  Description of Artificial Sequence: Synthetic probe
ttgactacagagggagggtccaggc

SEQ ID NO: 11229 - DNA, 19 bp, Artificial Sequence
  Description of Artificial Sequence: Synthetic primer
tctcgattacgctccgcac

SEQ ID NO: 11230 - DNA, 22 bp, Artificial Sequence
  Description of Artificial Sequence: Synthetic primer
tggccatgtctaagctacacac

SEQ ID NO: 11231 - DNA, 45 bp, Artificial Sequence
  Description of Artificial Sequence: Synthetic primer
  Description of Combined DNA/RNA Molecule: Synthetic primer
tggccatgtctaagctacacacgctgccactgctgctgttgtgct

SEQ ID NO: 11232 - DNA, 43 bp, Artificial Sequence
  Description of Artificial Sequence: Synthetic primer
  Description of Combined DNA/RNA Molecule: Synthetic primer
acgacgacgacgaaggagtccaggccattaagtgtgcacaaac

SEQ ID NO: 11233 - DNA, 45 bp, Artificial Sequence
  Description of Artificial Sequence: Synthetic primer
  Description of Combined DNA/RNA Molecule: Synthetic primer
acgacgacgacgaaccaggccattaagtgtgcacaaatccctgcg

SEQ ID NO: 11234 - DNA, 55 bp, Artificial Sequence
  Description of Artificial Sequence: Synthetic primer
  Description of Combined DNA/RNA Molecule: Synthetic primer
acgacgacgacttgacgaacataatcactggtgctcctgtgcagcctgaaugtgt

SEQ ID NO: 11235 - DNA, 52 bp, Artificial Sequence
  Description of Artificial Sequence: Synthetic oligonucleotide
  Description of Combined DNA/RNA Molecule: Synthetic oligonucleotide
tcacagagacttgccgatcacggtgctcaagagcaactctggaagcaccatg

SEQ ID NO: 11236 - DNA, 47 bp, Artificial Sequence
  Description of Artificial Sequence: Synthetic oligonucleotide
ccacagcccccacctgcttatctgcgtgtgtagcttagacatggcca

SEQ ID NO: 11237 - DNA, 22 bp, Artificial Sequence
  Description of Artificial Sequence: Synthetic probe
aaggaagcaccacagcccccac

SEQ ID NO: 11238 - DNA, 21 bp, Artificial Sequence
  Description of Artificial Sequence: Synthetic primer
tcacagagacttgccgatcac

SEQ ID NO: 11239 - DNA, 22 bp, Artificial Sequence
  Description of Artificial Sequence: Synthetic primer
tggccatgtctaagctacacac

SEQ ID NO: 11240 - DNA, 48 bp, Artificial Sequence
  Description of Artificial Sequence: Synthetic primer
  Description of Combined DNA/RNA Molecule: Synthetic primer
tggccatgtctaagctacacacgctcctgtgcagcctgaatatgcccc

SEQ ID NO: 11241 - DNA, 38 bp, Artificial Sequence
  Description of Artificial Sequence: Synthetic primer
  Description of Combined DNA/RNA Molecule: Synthetic primer
acgacgacgacgaaccagctctgcagcaagccagtgga

SEQ ID NO: 11242 - DNA, 38 bp, Artificial Sequence
  Description of Artificial Sequence: Synthetic primer
  Description of Combined DNA/RNA Molecule: Synthetic primer
acgacgacgacgaagcccagctctgcagcaagccagta

SEQ ID NO: 11243 - DNA, 49 bp, Artificial Sequence
  Description of Artificial Sequence: Synthetic primer
  Description of Combined DNA/RNA Molecule: Synthetic primer
acgacgacgacttgacgaacataatcacctgcttgctgcctggccctct

SEQ ID NO: 11244 - DNA, 47 bp, Artificial Sequence
  Description of Artificial Sequence: Synthetic oligonucleotide
  Description of Combined DNA/RNA Molecule: Synthetic oligonucleotide
tcacagagacttgccgatcacgcccaggcagtgttgagcgcaggctg

SEQ ID NO: 11245 - DNA, 45 bp, Artificial Sequence
  Description of Artificial Sequence: Synthetic oligonucleotide
ggccaggagcatcatagccaggggtgtgtagcttagacatggcca

SEQ ID NO: 11246 - DNA, 19 bp, Artificial Sequence
  Description of Artificial Sequence: Synthetic probe
aagagcgcaggccaggagc

SEQ ID NO: 11247 - DNA, 21 bp, Artificial Sequence
  Description of Artificial Sequence: Synthetic primer
tcacagagacttgccgatcac

SEQ ID NO: 11248 - DNA, 22 bp, Artificial Sequence
  Description of Artificial Sequence: Synthetic primer
tggccatgtctaagctacacac

SEQ ID NO: 11249 - DNA, 44 bp, Artificial Sequence
  Description of Artificial Sequence: Synthetic primer
  Description of Combined DNA/RNA Molecule: Synthetic primer
tggccatgtctaagctacacacgctgcctggccctccttggctg

SEQ ID NO: 11250 - DNA, 41 bp, Artificial Sequence
  Description of Artificial Sequence: Synthetic primer
  Description of Combined DNA/RNA Molecule: Synthetic primer
acgacgacgacgaagggcaggtcagcttcatccacauctcg

SEQ ID NO: 11251 - DNA, 39 bp, Artificial Sequence
  Description of Artificial Sequence: Synthetic primer
  Description of Combined DNA/RNA Molecule: Synthetic primer
acgacgacgacgaagctgtttgaggcaggtcagcutcac

SEQ ID NO: 11252 - DNA, 53 bp, Artificial Sequence
  Description of Artificial Sequence: Synthetic primer
  Description of Combined DNA/RNA Molecule: Synthetic primer
acgacgacgacttgacgaacataatcaaaagggtagcccactgccagauttcc

SEQ ID NO: 11253 - DNA, 53 bp, Artificial Sequence
  Description of Artificial Sequence: Synthetic oligonucleotide
  Description of Combined DNA/RNA Molecule: Synthetic oligonucleotide
ttcgtccctgcacgctaacctcaggagcaagtagagaattagcagacagcaat

SEQ ID NO: 11254 - DNA, 49 bp, Artificial Sequence
  Description of Artificial Sequence: Synthetic oligonucleotide
gcagcaatgctccacaaggtgagaagctggttccatcaccgttaggcca

SEQ ID NO: 11255 - DNA, 28 bp, Artificial Sequence
  Description of Artificial Sequence: Synthetic probe
ccgcagacagcagcaatgctccacaagg

SEQ ID NO: 11256 - DNA, 19 bp, Artificial Sequence
  Description of Artificial Sequence: Synthetic primer
ttcgtccctgcacgctaac

SEQ ID NO: 11257 - DNA, 20 bp, Artificial Sequence
  Description of Artificial Sequence: Synthetic primer
tggcctaacggtgatggaac

SEQ ID NO: 11258 - DNA, 44 bp, Artificial Sequence
  Description of Artificial Sequence: Synthetic primer
  Description of Combined DNA/RNA Molecule: Synthetic primer
acgacgacgacgaaaatcctctgcctccactggaaatcaatatc

SEQ ID NO: 11259 - DNA, 45 bp, Artificial Sequence
  Description of Artificial Sequence: Synthetic primer
  Description of Combined DNA/RNA Molecule: Synthetic primer
acgacgacgacgaatcctctgcctccactggaaatcaatautaga

SEQ ID NO: 11260 - DNA, 62 bp, Artificial Sequence
  Description of Artificial Sequence: Synthetic primer
  Description of Combined DNA/RNA Molecule: Synthetic primer
acgacgacgacttgacgaacataatggcccttacagaaactttttgacttgattagcuaaac

SEQ ID NO: 11261 - DNA, 47 bp, Artificial Sequence
  Description of Artificial Sequence: Synthetic oligonucleotide
  Description of Combined DNA/RNA Molecule: Synthetic oligonucleotide
tgatgctggcaaaccctagaacgccagcacaggcacagggcaucaaa

SEQ ID NO: 11262 - DNA, 45 bp, Artificial Sequence
  Description of Artificial Sequence: Synthetic oligonucleotide
tcagggccacagccagtaggttgtggttccatcaccgttaggcca

SEQ ID NO: 11263 - DNA, 22 bp, Artificial Sequence
  Description of Artificial Sequence: Synthetic probe
ttcagggcatcagggccacagc

SEQ ID NO: 11264 - DNA, 22 bp, Artificial Sequence
  Description of Artificial Sequence: Synthetic primer
tgatgctggcaaaccctagaac

SEQ ID NO: 11265 - DNA, 20 bp, Artificial Sequence
  Description of Artificial Sequence: Synthetic primer
tggcctaacggtgatggaac

SEQ ID NO: 11266 - DNA, 63 bp, Artificial Sequence
  Description of Artificial Sequence: Synthetic primer
  Description of Combined DNA/RNA Molecule: Synthetic primer
tggcctaacggtgatggaacacagaaactttttgacttgattagctaaatgatgaggtgtgcg

SEQ ID NO: 11267 - DNA, 37 bp, Artificial Sequence; identical to SEQ ID NO: 1647
  Description of Artificial Sequence: Synthetic primer
  Description of Combined DNA/RNA Molecule: Synthetic primer

SEQ ID NO: 11268 - DNA, 42 bp, Artificial Sequence; identical to SEQ ID NO: 1648
  Description of Artificial Sequence: Synthetic primer
  Description of Combined DNA/RNA Molecule: Synthetic primer

SEQ ID NO: 11269 - DNA, 48 bp, Artificial Sequence; identical to SEQ ID NO: 1649
  Description of Artificial Sequence: Synthetic primer
  Description of Combined DNA/RNA Molecule: Synthetic primer

SEQ ID NO: 11270 - DNA, 48 bp, Artificial Sequence; identical to SEQ ID NO: 1650
  Description of Artificial Sequence: Synthetic oligonucleotide
  Description of Combined DNA/RNA Molecule: Synthetic oligonucleotide

SEQ ID NO: 11271 - DNA, 57 bp, Artificial Sequence; identical to SEQ ID NO: 1651
  Description of Artificial Sequence: Synthetic oligonucleotide

SEQ ID NO: 11272 - DNA, 36 bp, Artificial Sequence; identical to SEQ ID NO: 1652
  Description of Artificial Sequence: Synthetic probe

SEQ ID NO: 11273 - DNA, 20 bp, Artificial Sequence
  Description of Artificial Sequence: Synthetic primer
tccgggtatacactgtccca

SEQ ID NO: 11274 - DNA, 21 bp, Artificial Sequence
  Description of Artificial Sequence: Synthetic primer
tggcctgtcctctgttaacca

SEQ ID NO: 11275 - DNA, 46 bp, Artificial Sequence; identical to SEQ ID NO: 1655
  Description of Artificial Sequence: Synthetic primer
  Description of Combined DNA/RNA Molecule: Synthetic primer

SEQ ID NO: 11276 - DNA, 45 bp, Artificial Sequence; identical to SEQ ID NO: 1799
  Description of Artificial Sequence: Synthetic primer
  Description of Combined DNA/RNA Molecule: Synthetic primer

SEQ ID NO: 11277 - DNA, 48 bp, Artificial Sequence; identical to SEQ ID NO: 1800
  Description of Artificial Sequence: Synthetic primer
  Description of Combined DNA/RNA Molecule: Synthetic primer

SEQ ID NO: 11278 - DNA, 55 bp, Artificial Sequence; identical to SEQ ID NO: 1801
  Description of Artificial Sequence: Synthetic primer
  Description of Combined DNA/RNA Molecule: Synthetic primer

SEQ ID NO: 11279 - DNA, 47 bp, Artificial Sequence; identical to SEQ ID NO: 1802
  Description of Artificial Sequence: Synthetic oligonucleotide
  Description of Combined DNA/RNA Molecule: Synthetic oligonucleotide

SEQ ID NO: 11280 - DNA, 49 bp, Artificial Sequence; identical to SEQ ID NO: 1803
  Description of Artificial Sequence: Synthetic oligonucleotide

SEQ ID NO: 11281 - DNA, 24 bp, Artificial Sequence
  Description of Artificial Sequence: Synthetic probe
ttggagacagccaggagaggcagc

SEQ ID NO: 11282 - DNA, 21 bp, Artificial Sequence
  Description of Artificial Sequence: Synthetic primer
taatctccagacctccgaacc

SEQ ID NO: 11283 - DNA, 22 bp, Artificial Sequence
  Description of Artificial Sequence: Synthetic primer
tgtcccgttcaatccttacacc

SEQ ID NO: 11284 - DNA, 48 bp, Artificial Sequence; identical to SEQ ID NO: 1807
  Description of Artificial Sequence: Synthetic primer
  Description of Combined DNA/RNA Molecule: Synthetic primer

SEQ ID NO: 11285 - DNA, 43 bp, Artificial Sequence; identical to SEQ ID NO: 4804
  Description of Artificial Sequence: Synthetic primer
  Description of Combined DNA/RNA Molecule: Synthetic primer

SEQ ID NO: 11286 - DNA, 45 bp, Artificial Sequence; identical to SEQ ID NO: 4805
  Description of Artificial Sequence: Synthetic primer
  Description of Combined DNA/RNA Molecule: Synthetic primer

SEQ ID NO: 11287 - DNA, 58 bp, Artificial Sequence; identical to SEQ ID NO: 4806
  Description of Artificial Sequence: Synthetic primer
  Description of Combined DNA/RNA Molecule: Synthetic primer

SEQ ID NO: 11288 - DNA, 53 bp, Artificial Sequence; identical to SEQ ID NO: 4807
  Description of Artificial Sequence: Synthetic oligonucleotide
  Description of Combined DNA/RNA Molecule: Synthetic oligonucleotide

SEQ ID NO: 11289 - DNA, 50 bp, Artificial Sequence; identical to SEQ ID NO: 4808
  Description of Artificial Sequence: Synthetic oligonucleotide

SEQ ID NO: 11290 - DNA, 31 bp, Artificial Sequence; identical to SEQ ID NO: 4809
  Description of Artificial Sequence: Synthetic probe

SEQ ID NO: 11291 - DNA, 19 bp, Artificial Sequence
  Description of Artificial Sequence: Synthetic primer
ttcgtccctgcacgctaac

SEQ ID NO: 11292 - DNA, 20 bp, Artificial Sequence
  Description of Artificial Sequence: Synthetic primer
tggcctaacggtgatggaac

SEQ ID NO: 11293 - DNA, 47 bp, Artificial Sequence; identical to SEQ ID NO: 4812
  Description of Artificial Sequence: Synthetic primer
  Description of Combined DNA/RNA Molecule: Synthetic primer

SEQ ID NO: 11294 - DNA, 40 bp, Artificial Sequence; identical to SEQ ID NO: 5575
  Description of Artificial Sequence: Synthetic primer
  Description of Combined DNA/RNA Molecule: Synthetic primer

SEQ ID NO: 11295 - DNA, 40 bp, Artificial Sequence; identical to SEQ ID NO: 5576
  Description of Artificial Sequence: Synthetic primer
  Description of Combined DNA/RNA Molecule: Synthetic primer

SEQ ID NO: 11296 - DNA, 50 bp, Artificial Sequence; identical to SEQ ID NO: 5577
  Description of Artificial Sequence: Synthetic primer
  Description of Combined DNA/RNA Molecule: Synthetic primer

SEQ ID NO: 11297 - DNA, 43 bp, Artificial Sequence; identical to SEQ ID NO: 5578
  Description of Artificial Sequence: Synthetic oligonucleotide
  Description of Combined DNA/RNA Molecule: Synthetic oligonucleotide

SEQ ID NO: 11298 - DNA, 47 bp, Artificial Sequence; identical to SEQ ID NO: 5579
  Description of Artificial Sequence: Synthetic oligonucleotide

SEQ ID NO: 11299 - DNA, 25 bp, Artificial Sequence
  Description of Artificial Sequence: Synthetic probe
ttgccaacacatggagggtgggagg

SEQ ID NO: 11300 - DNA, 20 bp, Artificial Sequence
  Description of Artificial Sequence: Synthetic primer
ttgtgcagagcgaacaacaa

SEQ ID NO: 11301 - DNA, 21 bp, Artificial Sequence
  Description of Artificial Sequence: Synthetic primer
tggcggtacaccaaatagcaa

SEQ ID NO: 11302 - DNA, 45 bp, Artificial Sequence; identical to SEQ ID NO: 5583
  Description of Artificial Sequence: Synthetic primer
  Description of Combined DNA/RNA Molecule: Synthetic primer

SEQ ID NO: 11303 - DNA, 41 bp, Artificial Sequence; identical to SEQ ID NO: 5593
  Description of Artificial Sequence: Synthetic primer
  Description of Combined DNA/RNA Molecule: Synthetic primer

SEQ ID NO: 11304 - DNA, 38 bp, Artificial Sequence; identical to SEQ ID NO: 5594
  Description of Artificial Sequence: Synthetic primer
  Description of Combined DNA/RNA Molecule: Synthetic primer

SEQ ID NO: 11305 - DNA, 53 bp, Artificial Sequence; identical to SEQ ID NO: 5595
  Description of Artificial Sequence: Synthetic primer
  Description of Combined DNA/RNA Molecule: Synthetic primer

SEQ ID NO: 11306 - DNA, 46 bp, Artificial Sequence; identical to SEQ ID NO: 5596
  Description of Artificial Sequence: Synthetic oligonucleotide
  Description of Combined DNA/RNA Molecule: Synthetic oligonucleotide

SEQ ID NO: 11307 - DNA, 44 bp, Artificial Sequence; identical to SEQ ID NO: 5597
  Description of Artificial Sequence: Synthetic oligonucleotide

SEQ ID NO: 11308 - DNA, 23 bp, Artificial Sequence
  Description of Artificial Sequence: Synthetic probe
ttctccgcaccccagctccagtc

SEQ ID NO: 11309 - DNA, 22 bp, Artificial Sequence
  Description of Artificial Sequence: Synthetic primer
tccaaacgattaggagcgtcaa

SEQ ID NO: 11310 - DNA, 21 bp, Artificial Sequence
  Description of Artificial Sequence: Synthetic primer
tgggcgtatacctctgtccaa

SEQ ID NO: 11311 - DNA, 48 bp, Artificial Sequence; identical to SEQ ID NO: 5601
  Description of Artificial Sequence: Synthetic primer
  Description of Combined DNA/RNA Molecule: Synthetic primer

SEQ ID NO: 11312 - DNA, 40 bp, Artificial Sequence; identical to SEQ ID NO: 5895
  Description of Artificial Sequence: Synthetic primer
  Description of Combined DNA/RNA Molecule: Synthetic primer

SEQ ID NO: 11313 - DNA, 41 bp, Artificial Sequence; identical to SEQ ID NO: 5896
  Description of Artificial Sequence: Synthetic primer
  Description of Combined DNA/RNA Molecule: Synthetic primer

SEQ ID NO: 11314 - DNA, 55 bp, Artificial Sequence; identical to SEQ ID NO: 5897
  Description of Artificial Sequence: Synthetic primer
  Description of Combined DNA/RNA Molecule: Synthetic primer

SEQ ID NO: 11315 - DNA, 44 bp, Artificial Sequence; identical to SEQ ID NO: 5898
  Description of Artificial Sequence: Synthetic oligonucleotide
  Description of Combined DNA/RNA Molecule: Synthetic oligonucleotide

SEQ ID NO: 11316 - DNA, 55 bp, Artificial Sequence; identical to SEQ ID NO: 8864
  Description of Artificial Sequence: Synthetic oligonucleotide

SEQ ID NO: 11317 - DNA, 35 bp, Artificial Sequence; identical to SEQ ID NO: 5900
  Description of Artificial Sequence: Synthetic probe

SEQ ID NO: 11318 - DNA, 19 bp, Artificial Sequence
  Description of Artificial Sequence: Synthetic primer
ttttcggcggcagctaaac

SEQ ID NO: 11319 - DNA, 19 bp, Artificial Sequence
  Description of Artificial Sequence: Synthetic primer
taagcacagcgacacgaac

SEQ ID NO: 11320 - DNA, 54 bp, Artificial Sequence; identical to SEQ ID NO: 5903
  Description of Artificial Sequence: Synthetic primer
  Description of Combined DNA/RNA Molecule: Synthetic primer

SEQ ID NO: 11321 - DNA, 41 bp, Artificial Sequence; identical to SEQ ID NO: 10937
  Description of Artificial Sequence: Synthetic primer
  Description of Combined DNA/RNA Molecule: Synthetic primer

SEQ ID NO: 11322 - DNA, 40 bp, Artificial Sequence; identical to SEQ ID NO: 10938
  Description of Artificial Sequence: Synthetic primer
  Description of Combined DNA/RNA Molecule: Synthetic primer

SEQ ID NO: 11323 - DNA, 51 bp, Artificial Sequence; identical to SEQ ID NO: 10939
  Description of Artificial Sequence: Synthetic primer
  Description of Combined DNA/RNA Molecule: Synthetic primer

SEQ ID NO: 11324 - DNA, 61 bp, Artificial Sequence; identical to SEQ ID NO: 10940
  Description of Artificial Sequence: Synthetic oligonucleotide
  Description of Combined DNA/RNA Molecule: Synthetic oligonucleotide

SEQ ID NO: 11325 - DNA, 58 bp, Artificial Sequence; identical to SEQ ID NO: 10941
  Description of Artificial Sequence: Synthetic oligonucleotide

SEQ ID NO: 11326 - DNA, 36 bp, Artificial Sequence; identical to SEQ ID NO: 10942
  Description of Artificial Sequence: Synthetic probe

SEQ ID NO: 11327 - DNA, 21 bp, Artificial Sequence
  Description of Artificial Sequence: Synthetic primer
tcgacgaatctgctcagacaa

SEQ ID NO: 11328 - DNA, 19 bp, Artificial Sequence
  Description of Artificial Sequence: Synthetic primer
tgctcagacgctgcttcaa

SEQ ID NO: 11329 - DNA, 44 bp, Artificial Sequence; identical to SEQ ID NO: 10945
  Description of Artificial Sequence: Synthetic primer
  Description of Combined DNA/RNA Molecule: Synthetic primer

SEQ ID NO: 11330 - DNA, 40 bp, Artificial Sequence
  Description of Artificial Sequence: Synthetic primer
  Description of Combined DNA/RNA Molecule: Synthetic primer
acgacgacgacgaacagaagtcccagctcccagcautttt

SEQ ID NO: 11331 - DNA, 39 bp, Artificial Sequence
  Description of Artificial Sequence: Synthetic primer
  Description of Combined DNA/RNA Molecule: Synthetic primer
acgacgacgacgaacccatcagcccccagcagaagtcct

SEQ ID NO: 11332 - DNA, 54 bp, Artificial Sequence
  Description of Artificial Sequence: Synthetic primer
  Description of Combined DNA/RNA Molecule: Synthetic primer
acgacgacgacttgacgaacataatcctcttggtgatgcagctctgaccutgct

SEQ ID NO: 11333 - DNA, 50 bp, Artificial Sequence
  Description of Artificial Sequence: Synthetic oligonucleotide
  Description of Combined DNA/RNA Molecule: Synthetic oligonucleotide
tgatgctggcaaaccctagaacctgtctcatggcaagttgggacagagaa

SEQ ID NO: 11334 - DNA, 44 bp, Artificial Sequence
  Description of Artificial Sequence: Synthetic oligonucleotide
gagggagcagcaggaaggtgccaggttccatcaccgttaggcca

SEQ ID NO: 11335 - DNA, 23 bp, Artificial Sequence
  Description of Artificial Sequence: Synthetic probe
aatgggacagagggagcagcagg

SEQ ID NO: 11336 - DNA, 22 bp, Artificial Sequence
  Description of Artificial Sequence: Synthetic primer
tgatgctggcaaaccctagaac

SEQ ID NO: 11337 - DNA, 20 bp, Artificial Sequence
  Description of Artificial Sequence: Synthetic primer
tggcctaacggtgatggaac

SEQ ID NO: 11338 - DNA, 46 bp, Artificial Sequence
  Description of Artificial Sequence: Synthetic primer
  Description of Combined DNA/RNA Molecule: Synthetic primer
tggcctaacggtgatggaaccagctctgaccttgcccacttggcat

SEQ ID NO: 11339 - DNA, 42 bp, Artificial Sequence
  Description of Artificial Sequence: Synthetic primer
  Description of Combined DNA/RNA Molecule: Synthetic primer
acgacgacgacgaacctggacaatgtgaaggaggccaugact

SEQ ID NO: 11340 - DNA, 43 bp, Artificial Sequence
  Description of Artificial Sequence: Synthetic primer
  Description of Combined DNA/RNA Molecule: Synthetic primer
acgacgacgacgaacatgcccaacctggacaatgtgaaggaga

SEQ ID NO: 11341 - DNA, 57 bp, Artificial Sequence
  Description of Artificial Sequence: Synthetic primer
  Description of Combined DNA/RNA Molecule: Synthetic primer
acgacgacgacttgacgaacataatcagggaagcagcaaaaatgaacagcaautgga

SEQ ID NO: 11342 - DNA, 56 bp, Artificial Sequence
  Description of Artificial Sequence: Synthetic oligonucleotide
  Description of Combined DNA/RNA Molecule: Synthetic oligonucleotide
ttttcggcatccgcttccagaggatgcatgtttttaagaacaactctctcagcccg

SEQ ID NO: 11343 - DNA, 53 bp, Artificial Sequence
  Description of Artificial Sequence: Synthetic oligonucleotide
gcctaacacaaggaccttcaccctgttttcagtggttaacagaggacaggcca

SEQ ID NO: 11344 - DNA, 31 bp, Artificial Sequence
  Description of Artificial Sequence: Synthetic probe
tttctctcagcctaacacaaggaccttcacc

SEQ ID NO: 11345 - DNA, 19 bp, Artificial Sequence
  Description of Artificial Sequence: Synthetic primer
ttttcggcatccgcttcca

SEQ ID NO: 11346 - DNA, 21 bp, Artificial Sequence
  Description of Artificial Sequence: Synthetic primer
tggcctgtcctctgttaacca

SEQ ID NO: 11347 - DNA, 40 bp, Artificial Sequence
  Description of Artificial Sequence: Synthetic primer
  Description of Combined DNA/RNA Molecule: Synthetic primer
acgacgacgacgaactccacctcaaggaggcagcaggact

SEQ ID NO: 11348 - DNA, 39 bp, Artificial Sequence
  Description of Artificial Sequence: Synthetic primer
  Description of Combined DNA/RNA Molecule: Synthetic primer
acgacgacgacgaaagaggcctccacctcaaggaggcaa

SEQ ID NO: 11349 - DNA, 48 bp, Artificial Sequence
  Description of Artificial Sequence: Synthetic primer
  Description of Combined DNA/RNA Molecule: Synthetic primer
acgacgacgacttgacgaacataatctggcccattggccccacuggct

SEQ ID NO: 11350 - DNA, 46 bp, Artificial Sequence
  Description of Artificial Sequence: Synthetic oligonucleotide
  Description of Combined DNA/RNA Molecule: Synthetic oligonucleotide
tgcgactctattcacgtccaagacctgagaggccatggccactgtg

SEQ ID NO: 11351 - DNA, 52 bp, Artificial Sequence
  Description of Artificial Sequence: Synthetic oligonucleotide
ctgcactttgtccaagacccctagattggccttgctatttggtgtaccgcca

SEQ ID NO: 11352 - DNA, 27 bp, Artificial Sequence
  Description of Artificial Sequence: Synthetic probe
ttatggccactgcactttgtccaagac

SEQ ID NO: 11353 - DNA, 21 bp, Artificial Sequence
  Description of Artificial Sequence: Synthetic primer
tgcgactctattcacgtccaa

SEQ ID NO: 11354 - DNA, 21 bp, Artificial Sequence
  Description of Artificial Sequence: Synthetic primer
tggcggtacaccaaatagcaa

SEQ ID NO: 11355 - DNA, 46 bp, Artificial Sequence
  Description of Artificial Sequence: Synthetic primer
  Description of Combined DNA/RNA Molecule: Synthetic primer
tggcggtacaccaaatagcaaggccctccctgcacctttttggtcc

SEQ ID NO: 11356 - DNA, 41 bp, Artificial Sequence; identical to SEQ ID NO: 8202
  Description of Artificial Sequence: Synthetic primer
  Description of Combined DNA/RNA Molecule: Synthetic primer

SEQ ID NO: 11357 - DNA, 42 bp, Artificial Sequence; identical to SEQ ID NO: 8203
  Description of Artificial Sequence: Synthetic primer
  Description of Combined DNA/RNA Molecule: Synthetic primer

SEQ ID NO: 11358 - DNA, 67 bp, Artificial Sequence; identical to SEQ ID NO: 8204
  Description of Artificial Sequence: Synthetic primer
  Description of Combined DNA/RNA Molecule: Synthetic primer

SEQ ID NO: 11359 - DNA, 47 bp, Artificial Sequence; identical to SEQ ID NO: 8205
  Description of Artificial Sequence: Synthetic oligonucleotide
  Description of Combined DNA/RNA Molecule: Synthetic oligonucleotide

SEQ ID NO: 11360 - DNA, 51 bp, Artificial Sequence; identical to SEQ ID NO: 8206
  Description of Artificial Sequence: Synthetic oligonucleotide

SEQ ID NO: 11361 - DNA, 32 bp, Artificial Sequence; identical to SEQ ID NO: 8207
  Description of Artificial Sequence: Synthetic probe

SEQ ID NO: 11362 - DNA, 20 bp, Artificial Sequence
  Description of Artificial Sequence: Synthetic primer
ttgtgcagagcgaacaacaa

SEQ ID NO: 11363 - DNA, 21 bp, Artificial Sequence
  Description of Artificial Sequence: Synthetic primer
tggcggtacaccaaatagcaa

SEQ ID NO: 11364 - DNA, 60 bp, Artificial Sequence; identical to SEQ ID NO: 8210
  Description of Artificial Sequence: Synthetic primer
  Description of Combined DNA/RNA Molecule: Synthetic primer

SEQ ID NO: 11365 - DNA, 41 bp, Artificial Sequence; identical to SEQ ID NO: 8211
  Description of Artificial Sequence: Synthetic primer
  Description of Combined DNA/RNA Molecule: Synthetic primer

SEQ ID NO: 11366 - DNA, 43 bp, Artificial Sequence; identical to SEQ ID NO: 8212
  Description of Artificial Sequence: Synthetic primer
  Description of Combined DNA/RNA Molecule: Synthetic primer

SEQ ID NO: 11367 - DNA, 57 bp, Artificial Sequence; identical to SEQ ID NO: 8213
  Description of Artificial Sequence: Synthetic primer
  Description of Combined DNA/RNA Molecule: Synthetic primer

SEQ ID NO: 11368 - DNA, 47 bp, Artificial Sequence; identical to SEQ ID NO: 8214
  Description of Artificial Sequence: Synthetic oligonucleotide
  Description of Combined DNA/RNA Molecule: Synthetic oligonucleotide

SEQ ID NO: 11369 - DNA, 47 bp, Artificial Sequence; identical to SEQ ID NO: 8215
  Description of Artificial Sequence: Synthetic oligonucleotide

SEQ ID NO: 11370 - DNA, 29 bp, Artificial Sequence
  Description of Artificial Sequence: Synthetic probe
ttgtcatcaggcaactccagagtctcccc

SEQ ID NO: 11371 - DNA, 22 bp, Artificial Sequence
  Description of Artificial Sequence: Synthetic primer
tccaaacgattaggagcgtcaa

SEQ ID NO: 11372 - DNA, 21 bp, Artificial Sequence
  Description of Artificial Sequence: Synthetic primer
tgggcgtatacctctgtccaa

SEQ ID NO: 11373 - DNA, 45 bp, Artificial Sequence; identical to SEQ ID NO: 8219
  Description of Artificial Sequence: Synthetic primer
  Description of Combined DNA/RNA Molecule: Synthetic primer

SEQ ID NO: 11374 - DNA, 39 bp, Artificial Sequence; identical to SEQ ID NO: 8220
  Description of Artificial Sequence: Synthetic primer
  Description of Combined DNA/RNA Molecule: Synthetic primer

SEQ ID NO: 11375 - DNA, 41 bp, Artificial Sequence; identical to SEQ ID NO: 8221
  Description of Artificial Sequence: Synthetic primer
  Description of Combined DNA/RNA Molecule: Synthetic primer

SEQ ID NO: 11376 - DNA, 54 bp, Artificial Sequence; identical to SEQ ID NO: 8222
  Description of Artificial Sequence: Synthetic primer
  Description of Combined DNA/RNA Molecule: Synthetic primer

SEQ ID NO: 11377 - DNA, 46 bp, Artificial Sequence; identical to SEQ ID NO: 8223
  Description of Artificial Sequence: Synthetic oligonucleotide
  Description of Combined DNA/RNA Molecule: Synthetic oligonucleotide

SEQ ID NO: 11378 - DNA, 44 bp, Artificial Sequence; identical to SEQ ID NO: 8224
  Description of Artificial Sequence: Synthetic oligonucleotide

SEQ ID NO: 11379 - DNA, 26 bp, Artificial Sequence
  Description of Artificial Sequence: Synthetic probe
aagggagcaagaacaaagcagccagg

SEQ ID NO: 11380 - DNA, 19 bp, Artificial Sequence
  Description of Artificial Sequence: Synthetic primer
ttgcagcgggtcacaacaa

SEQ ID NO: 11381 - DNA, 21 bp, Artificial Sequence
  Description of Artificial Sequence: Synthetic primer
tgggcgtatacctctgtccaa

SEQ ID NO: 11382 - DNA, 49 bp, Artificial Sequence; identical to SEQ ID NO: 8228
  Description of Artificial Sequence: Synthetic primer
  Description of Combined DNA/RNA Molecule: Synthetic primer

SEQ ID NO: 11383 - DNA, 38 bp, Artificial Sequence; identical to SEQ ID NO: 8229
  Description of Artificial Sequence: Synthetic primer
  Description of Combined DNA/RNA Molecule: Synthetic primer

SEQ ID NO: 11384 - DNA, 39 bp, Artificial Sequence; identical to SEQ ID NO: 8230
  Description of Artificial Sequence: Synthetic primer
  Description of Combined DNA/RNA Molecule: Synthetic primer

SEQ ID NO: 11385 - DNA, 48 bp, Artificial Sequence; identical to SEQ ID NO: 8231
  Description of Artificial Sequence: Synthetic primer
  Description of Combined DNA/RNA Molecule: Synthetic primer

SEQ ID NO: 11386 - DNA, 52 bp, Artificial Sequence; identical to SEQ ID NO: 8232
  Description of Artificial Sequence: Synthetic oligonucleotide
  Description of Combined DNA/RNA Molecule: Synthetic oligonucleotide

SEQ ID NO: 11387 - DNA, 44 bp, Artificial Sequence; identical to SEQ ID NO: 8233
  Description of Artificial Sequence: Synthetic oligonucleotide

SEQ ID NO: 11388 - DNA, 28 bp, Artificial Sequence
  Description of Artificial Sequence: Synthetic probe
ttgtttacatcacacagctgggcaggca

SEQ ID NO: 11389 - DNA, 20 bp, Artificial Sequence
  Description of Artificial Sequence: Synthetic primer
tcgtcccggtcagtagtcaa

SEQ ID NO: 11390 - DNA, 20 bp, Artificial Sequence
  Description of Artificial Sequence: Synthetic primer
tgggtgcagaaaatgggcaa

SEQ ID NO: 11391 - DNA, 47 bp, Artificial Sequence; identical to SEQ ID NO: 8237
  Description of Artificial Sequence: Synthetic primer
  Description of Combined DNA/RNA Molecule: Synthetic primer

SEQ ID NO: 11392 - DNA, 42 bp, Artificial Sequence
  Description of Artificial Sequence: Synthetic primer
  Description of Combined DNA/RNA Molecule: Synthetic primer
acgacgacgacgaagggaagtaagaggcatgtgcacagaggt

SEQ ID NO: 11393 - DNA, 41 bp, Artificial Sequence
  Description of Artificial Sequence: Synthetic primer
  Description of Combined DNA/RNA Molecule: Synthetic primer
acgacgacgacgaataagaggcatgtgcacagaggcucttt

SEQ ID NO: 11394 - DNA, 56 bp, Artificial Sequence
  Description of Artificial Sequence: Synthetic primer
  Description of Combined DNA/RNA Molecule: Synthetic primer
acgacgacgacttgacgaacataattttctgaatggccttgtttggcttgcacctc

SEQ ID NO: 11395 - DNA, 50 bp, Artificial Sequence
  Description of Artificial Sequence: Synthetic oligonucleotide
  Description of Combined DNA/RNA Molecule: Synthetic oligonucleotide
ttcgtgcgtcgtgtagcaatcttcatcccttccagagatgccgcagccgg

SEQ ID NO: 11396 - DNA, 49 bp, Artificial Sequence
  Description of Artificial Sequence: Synthetic oligonucleotide
gccaaccagcacactttggttcagcaagcttgcccattttctgcaccca

SEQ ID NO: 11397 - DNA, 20 bp, Artificial Sequence
  Description of Artificial Sequence: Synthetic probe
tttgccgcagccaaccagca

SEQ ID NO: 11398 - DNA, 19 bp, Artificial Sequence
  Description of Artificial Sequence: Synthetic primer
ttcgtgcgtcgtgtagcaa

SEQ ID NO: 11399 - DNA, 20 bp, Artificial Sequence
  Description of Artificial Sequence: Synthetic primer
tgggtgcagaaaatgggcaa

SEQ ID NO: 11400 - DNA, 51 bp, Artificial Sequence
  Description of Artificial Sequence: Synthetic primer
  Description of Combined DNA/RNA Molecule: Synthetic primer
tgggtgcagaaaatgggcaaaccttctgtgcttgctgaaccaaaatgtgcc
